(19) United States
(12) Patent Application Publication
(10) Pub. No.: US 2002/0161207 A1
(43) Pub. Date: Oct. 31, 2002

(54) Novel murine polynucleotide sequences and mutant cells and mutant animals defined thereby

(76) Inventors: Glenn Friedrich, Houston, TX (US); Brian Zambrowicz, The Woodlands, TX (US); Arthur T. Sands, The Woodlands, TX (US)

Correspondence Address: LEXICON GENETICS INCORPORATED, 4000 RESEARCH FOREST DRIVE, THE WOODLANDS, TX, 77381, US

(21) Appl. No.: 09/728,444

(22) Filed: Nov. 30, 2000

Related U.S. Application Data
(60) Provisional application No. 60/168,360, filed on Dec. 1, 1999.

(51) Int. Cl. C07H 21/02; C07H 21/04

(52) U.S. Cl. 536/23.1

(57) ABSTRACT

Novel murine polynucleotides are disclosed that individually identify novel genes into which a retroviral gene trap vector has integrated. Additionally, novel mutated murine ES cells are described that stably incorporate retroviral gene trap constructs into the specifically identified genes. The novel genes and cells thus defined are useful in functional genomic analysis, and in the discovery and development of new therapeutic and diagnostics agents and methods.

[0001] The present application claims the benefit of U.S. Provisional Application Ser. No. 60/168,360, filed Dec. 1, 1999, herein incorporated by reference, and further incorporates by reference U.S. applications Ser. Nos. 08/726,867, 08/728,963, 08/907,598, 08/942,806, 60/109,302, 09/276,533 and U.S. Pat. No. 6,080,576 which issued Jun. 27, 2000 and their respective disclosures in their entirety.

### 1.0 FIELD OF THE INVENTION

[0002] The present invention is in the field of molecular genetics. The application discloses novel nucleic acid sequences that: each define the locus of a corresponding mutated murine embryonic stem cell clone, partially define the scope of exons that can be trapped and identified by the disclosed vectors/methods, and that are also useful, inter alia, for identifying the coding regions of the murine genome.

### 2.0 BACKGROUND OF THE INVENTION

[0003] Most mammalian genes are divided into exons and introns. Exons are the portions of the gene that are spliced into mRNA and encode the protein product of a gene. In genomic DNA, these coding exons are divided by noncoding intron sequences. Although RNA polymerase transcribes both intron and exon sequences, the intron sequences must be removed from the transcript so that the resulting mRNA can be translated into protein. Accordingly, all mammalian, and most eukaryotic, cells have the machinery to splice exons into mRNA. Gene trap vectors have been designed to integrate into introns or genes in a manner that allows the cellular splicing machinery to splice vector encoded exons to cellular mRNAs. Commonly, gene trap vectors contain selectable marker sequences that are preceded by strong splice acceptor sequences and are not preceded by a promoter. Thus, when such vectors integrate into a gene, the cellular splicing machinery splices exons from the trapped gene onto the 5′ end of the selectable marker sequence. Typically, such selectable marker genes can only be expressed if the vector encoding the gene has integrated into an intron. The resulting gene trap events are subsequently identified by selecting for cells that can survive selective culture.

[0004] Gene trapping has generally proven to be an efficient method of mutating large numbers of genes. The insertion of the gene trap vector creates a mutation in the trapped gene, and also provides a molecular tag for ease of identifying the gene that has been trapped. When ROSA Bgeo was used to trap genes it was demonstrated that at least 50% of the resulting mutations resulted in a phenotype when examined in mice. This indicates that the gene trap insertion vectors are useful mutagens. Although a powerful tool for mutating genes, the potential of the method has historically been limited by the difficulty in identifying the trapped genes. Methods that have been used to identify trap events rely on the fusion transcripts resulting from the splicing of exon sequences from the trapped gene to sequences encoded by the gene trap vector. Common gene identification protocols used to obtain sequences from these fusion transcripts include 5′ RACE, cDNA cloning, and cloning of genomic DNA surrounding the site of vector integration. However, these methods have proven labor intensive, not readily amenable to automation, and generally impractical for high-throughput.

[0005] More recently, vectors have been developed that rely on a new strategy of gene trapping that uses a vector that contains a selectable marker gene preceded by a promoter and followed by a splice donor sequence instead of a polyadenylation sequence. These vectors do not provide selection unless they integrate into a gene and subsequently trap downstream exons which provide a polyadenylation sequence. Integration of such vectors into the chromosome results in the splicing of the selectable marker gene to 3′ exons of the trapped gene. These vectors provide a number of advantages. They can be used to trap genes regardless of whether the genes are normally expressed in the cell type in which the vector has integrated. In addition, cells harboring such vectors can be screened using automated (e.g., 96-well plate format) gene identification assays such as 3′ RACE (see generally, Frohman, 1994, PCR Methods and Applications, 4:S40-S58). Using these vectors it is possible to produce large numbers of mutations and rapidly identify the mutated, or trapped, gene by DNA sequence analysis.

### 3.0 SUMMARY OF THE INVENTION

[0006] The subject invention provides numerous isolated and purified mammalian, particularly murine, cDNAs produced using gene trap technology. The OMNIBANK gene trapped sequences (GTSs) of the subject invention are disclosed as SEQ ID NOS: 1-1,206 in the appended Sequence Listing.

[0007] The subject invention contemplates the use of one or more of the subject GTSs, or portions thereof, to isolate cDNAs, genomic clones, or full-length genes/polynucleotides, or homologs, heterologs, paralogs, or orthologs thereof, that are capable of hybridizing to one or more of the disclosed GTSs under stringent conditions.

[0008] The subject invention additionally contemplates methods of analyzing biopolymer (e.g., oligonucleotides, polynucleotides, oligopeptides, peptides, polypeptides, proteins, etc.) sequence information comprising the steps of loading a first biopolymer sequence into or onto an electronic data storage medium (e.g., digital or analogue versions of electronic, magnetic, or optical memory, and the like) and comparing said first sequence to at least a portion of one of the polynucleotide sequences, or amino acid sequence encoded thereby, that is first disclosed in, or otherwise unique to, SEQ ID NOS: 1-1,206. Typically, the polynucleotide sequences, or amino acid sequences encoded thereby, will also be present on, or loaded into or onto a form of electronic data storage medium, or transferred therefrom, concurrent with or prior to comparison with the first polynucleotide.

[0009] Another embodiment of the claimed invention is the use of a oligonucleotide or polynucleotide sequence first disclosed in at least a portion of at least one of the GTS sequences of SEQ ID NOS: 1-1,206 as a hybridization probe. Of particular interest is the use of such sequences in conjunction with a solid support matrix/substrate (resins, beads, membranes, plastics, polymers, metal or metallized substrates, crystalline or polycrystalline substrates, etc.). Of particular note are spatially addressable arrays (i.e., gene chips, microtiter plates, etc.) of polynucleotides wherein at least one of the polynucleotides on the spatially addressable array comprises an oligonucleotide or polynucleotide sequence first disclosed in at least one of the GTS sequences of SEQ ID NOS: 1-1,206.

[0010] Moreover, an oligonucleotide or polynucleotide sequence first disclosed in at least one of the GTS sequences of SEQ ID NOS: 1-1,206 can be incorporated into a phage display system that can be used to screen for proteins, or other ligands, that are capable of binding an amino acid sequence encoded by an oligonucleotide or polynucleotide sequence first disclosed in at least one of the GTS sequences of SEQ ID NOS: 1-1,206.

[0011] An additional embodiment of the present invention is a library comprising individually isolated linear DNA molecules corresponding to at least a portion of the described GTSs which are useful for synthesizing physically contiguous sequences of overlapping related GTSs by, for example, the polymerase chain reaction (PCR).

[0012] The subject invention also provides for an oligonucleotide hybridization probe comprising sequence that is identical or complementary to a portion of a sequence that is first disclosed in, or preferably unique to, at least one of the GTS polynucleotides the sequence listing. The oligonucleotide probes will generally comprise between about 8 nucleotides and about 80 nucleotides, preferably between about 15 and about 40 nucleotides, and more preferably between about 20 and about 35 nucleotides.

[0013] The subject invention also provides for an antisense molecule which comprises at least a portion of sequence that is first disclosed in, or preferably unique to, at least one of the GTS polynucleotides.

[0014] The subject invention also contemplates a purified polypeptide in which at least a portion of the polypeptide is encoded by, and thus first disclosed by, at least a portion of a GTS of the present invention.

[0015] The subject invention further contemplates a mutated ES cell, or a mutated cell, tissue, or animal derived therefrom, that stably incorporates a gene trap vector into a specifically identified gene or a gene comprising one or more of the disclosed GTS polynucleotide sequences.

[0016] In summary, the unique sequences described in SEQ ID NOS:1-1,206 are usefull for the identification of coding sequence and the mapping of a unique gene to a particular chromosome. These novel sequences can also be used in addressable arrays, such as gene chips, to identify and characterize temporal and tissue specific gene expression. When the unique sequences described in SEQ ID NOS:1-1,206 are expressed in mouse embryonic stem cells (“ES cells”) these novel sequences provide a method of identifying phenotypic expression of the a particular gene as well as a method of assigning function to preveously unknown genes. The unique sequences described in SEQ ID NOS:1-1,206 can be further used to identify the gene of interest from many sources including, but not limited to, libraries consisting of cDNA or genomic clones and for the in silico screening of nucleic acid and protein databases. Additionally, SEQ ID NOS: 1-1,206 can be incorporated into a phage display system and used to screen for proteins, or other ligands. The unique sequences described in SEQ ID NOS:1-1,206 have further utility for genetic manipulations such as antisense inhibition and gene targeting.

### 4.0 DESCRIPTION OF THE SEQUENCE LISTING AND FIGURES

[0017] The Sequence Listing is a compilation of nucleotide sequences obtained by sequencing a gene trap library that at least partially identifies the genes in the target cell genome that can be trapped by the described gene trap vectors (i.e., the repertoire of genes that are active, or have not been inactivated, with the tested ES cell population). The Sequence Listing was prepared using the conventions described in the 1996 edition of the 37 C.F.R. sections 1.801-1.825, and/or WIPO Standard ST.25 as referenced by the 1999 edition of 37 C.F.R. sections 1.801-1.825

[0018] FIGS. 1A-1C present a diagrammatic representation of representative gene trap vectors used to generate the described sequences.

### 5.0 DETAILED DESCRIPTION OF THE INVENTION

[0019] The current invention relates to novel polynucleotides which are expressed in mouse embryonic stem cells (“ES cells”) and which provide unique tools for gene discovery, diagnostic gene expression analysis, cross species hybridization analysis, and for genetic manipulations using a variety of techniques known to those skilled in the art, like, for example, antisense inhibition, gene targeting, etc. Furthermore, the expression of these novel polynucleotides in ES cells suggests their involvement in developmental and cell differentiation processes, making them good candidates to treat disorders and abnormalities affecting development and cell differentiation.

[0020] Additionally, because they are totipotent, the disclosed mutated ES cells (Lex-1 cells from murine strain A129) can be microinjected into blastocysts, introduced to pseudopregnant host animals, and the offspring bred to produce mutated animals as described, for example, in “Mouse Mutagenesis”, 1998, Zambrowicz et al., eds., Lexicon Press, The Woodlands, Tex., and periodic updates thereof, and U.S. patent application Ser. No. 08/943,687 both of which are herein incorporated by reference. Consequently, an additional aspect of the subject invention are mutated mammalian, and preferably murine, cells that have been mutated by a process involving the use genetically engineered vectors or nucleotides to alter the naturally occurring function, sequence, or expression of a genetic locus encoding a novel portion of sequence (e.g., an exon, oligonucleotide sequence, splice junction, etc.) presented in one of the presently described GTSs.

### 5.1 POLYNUCLEOTIDES OF THE PRESENT INVENTION

[0021] The nucleotide sequences of the various isolated GTSs of the present invention appear in the Sequence Listing as SEQ ID NOS: 1-1,206. Additional embodiments of the present invention are GTS variants, or homologs, paralogs, orthologs, etc., which include isolated polynucleotides, or complements thereof, that hybridize to one or more of the disclosed GTSs of SEQ ID NOS: 1-1,206 under stringent, or preferably highly stringent, conditions.

[0022] By way of example and not limitation, high stringency hybridization conditions can be defined as follows: Prehybridization of filters containing DNA to be screened is carried out for 8 h to overnight at 65° C. in a buffer containing 6×SSC, 50 mM Tris-HCl (pH 7.5), 1 mM EDTA, 0.02% PVP, 0.02% Ficoll, 0.02% BSA, and 500 μg/ml denatured salmon sperm DNA. Filters are hybridized for 48 h at 65° C. in prehybridization mixture containing 100 μg/ml denatured salmon sperm DNA and 5-20×10⁶ cpm of ³²P-labeled probe (alternatively, as in all hybridizations described herein, approximately 42, 44, 46, 48, 50, 52, 54, 56, 58, 62, 64, 66, 68, 70, or about 72 degrees or more can be used). The filters are then washed in approximately 1× wash mix (10× wash mix contains 3M NaCl, 0.6M Tris base, and 0.02M EDTA, alternatively, as with all washes described herein, 2×, 3×, 4×, 5×, 6× wash mix, or more, can be used) twice for 5 minutes each at room temperature, then in 1× wash mix containing 1% SDS at 60° C. (alternatively, as in all washes described herein, approximately 42, 44, 46, 48, 50, 52, 54, 56, 58, 62, 64, 66, 68, 70, or about 72 degrees or more can be used) for about 30 min, and finally in 0.3× wash mix (alternatively, as in all final washes described herein, approximately, 0.2×, 0.4×, 0.6×, 0.8×, 1×, or any concentration between about 2× and about 6× can be used in conjunction with a suitable wash temperature) containing 0.1% SDS at 60° C. (alternatively, approximately 42, 44, 46, 48, 50, 52, 54, 56, 58, 62, 64, 66, 68, 70, or about 72 degrees or more can be used) for about 30 min. The filters are then air dried and exposed to x-ray film for autoradiography. In an alternative protocol, washing of filters is done for 37° C. for 1 h in a solution containing 2×SSC, 0.01% PVP, 0.01% Ficoll, and 0.01% BSA. This is followed by a wash in 0.1×SSC at 50° C. for 45 min before autoradiography. Another example of hybridization under highly stringent conditions is hybridization to filter-bound DNA in 0.5 M NaHPO₄, 7% sodium dodecyl sulfate (SDS), 1 mM EDTA at 65° C., and washing in 0.1×SSC/0.1% SDS at 68° C. (Ausubel F. M. et al., eds., 1989, Current Protocols in Molecular Biology, Vol. I, Green Publishing Associates, Inc., and John Wiley & sons, Inc., New York, at p. 2.10.3).

[0023] Additionally contemplated are GTS polynucleotides that are at least about 99, 95, 90, or about 85 percent similar to corresponding regions of one of SEQ ID NOS: 1-1,206 (as measured by BLAST sequence comparison analysis using, for example, the GCG sequence analysis package using default parameters).

[0024] Preferably, such GTS variants will encode at least a portion or domain of a, preferably naturally occurring, protein or polypeptide that encodes a functional equivalent to a protein or polypeptide, or portion or domain thereof, encoded by the disclosed GTSs. Additional examples of GTS variants include polynucleotides, or complements thereof, that are capable of binding to the disclosed GTSs under less stringent conditions, such as moderately stringent conditions, (e.g., washing in 0.2×SSC/0.1% SDS at 42° C. (Ausubel et al., 1989, supra). Moderately stringent conditions can be additionally defined, for example, as follows: Filters containing DNA are pretreated for 6 h at 55° C. in a solution containing 6×SSC, 5× Denhart's solution, 0.5% SDS and 100 ig/ml denatured salmon sperm DNA. Hybridizations are carried out in the same solution and 5-20×10⁶ cpm ³²P-labeled probe is used. Filters are incubated in hybridization mixture for 18-20 h at 55° C. (alternatively, as in all hybridizations described herein, approximately 42, 44, 46, 48, 50, 52, 54, 56, 58, 62, 64, 66, 68, 70, or about 72 degrees or more can be used in combination with a suitable concentration of salt). The filters are then washed in approximately 1× wash mix (10× wash mix contains 3M NaCl, 0.6M Tris base, and 0.02M EDTA, alternatively, as with all washes described herein, 2×, 3×, 4×, 5×, 6× wash mix, or more, can be used) twice for 5 minutes each at room temperature, then in 1× wash mix containing 1% SDS at 60° C. (alternatively, as in all washes described herein, approximately, 42, 44, 46, 48, 50, 52, 54, 56, 58, 62, 64, 66, 68, 70, or about 72 degrees or more can be used) for about 30 min, and finally in 0.3× wash mix (alternatively, as in all final washes described herein approximately 0.2×, 0.4×, 0.6×, 0.8×, 1×, or any concentration between about 2× and about 6× can be used in conjunction with a suitable wash temperature) containing 0.1% SDS at 60° C. (alternatively, approximately 42, 44, 45, 48, 50, 52, 54, 56, 58, 62, 64, 66, 68, 70, or about 72 degrees or more can be used) for about 30 min. The filters are then air dried and exposed to x-ray film for autoradiography.

[0025] In an alternative protocol, washing of filters is done twice for 30 minutes at 60° C. in a solution containing 1×SSC and 0.1% SDS. Filters are blotted dry and exposed for autoradiography.

[0026] Other conditions of moderate stringency which may be used are well-known in the art. For example, washing of filters can be done at 37° C. for 1 h in a solution containing 2×SSC, 0.1% SDS. Another example of hybridization under moderately stringent conditions is washing in 0.2×SSC/0.1% SDS at 42° C. (Ausubel et al., 1989, supra). Such less stringent conditions may also be, for example, low stringency hybridization conditions. By way of example and not limitation, procedures using such conditions of low stringency are as follows (see also Shilo and Weinberg, 1981, Proc. Natl. Acad. Sci. USA 78:6789-6792): Filters containing DNA are pretreated for 6 h at 40° C. in a solution containing 35% formamide, 5×SSC, 50 mM Tris-HCl (pH 7.5), 5 mM EDTA, 0.1% PVP, 0.1% Ficoll, 1% BSA, and 500 μg/ml denatured salmon sperm DNA. Hybridizations are carried out in the same solution with the following modifications: 0.02% PVP, 0.02% Ficoll, 0.2% BSA, 100 μg/ml salmon sperm DNA, 10% (wt/vol) dextran sulfate, and 5-20×10⁶ cpm ³²P-labeled probe is used. Filters are incubated in hybridization mixture for 18-20 h at 40° C. (alternatively, as in all hybridizations described herein, approximately 42, 44, 46, 48, 50, 52, 54, 56, 58, 62, 64, 66, 68, 70, or about 72 degrees or more can be used). The filters are then washed in approximately 1× wash mix (10× wash mix contains 3M NaCl, 0.6M Tris base, and 0.02M EDTA, alternatively, as with all washes described herein, 2×, 3×, 4×, 5×, 6× wash mix, or more, can be used) twice for five minutes each at room temperature, then in 1× wash mix containing 1% SDS at 60° C. (alternatively, as in all washes described herein, approximately 42, 44, 46, 48, 50, 52, 54, 56, 58, 62, 64, 66, 68, 70, or about 72 degrees or more can be used) for about 30 min, and finally in 0.3× wash mix (alternatively, as in all final washes described herein, approximately, 0.2×, 0.4×, 0.6×, 0.8×, 1×, or any concentration between about 2× and about 6× can be used in conjunction with a suitable wash temperature) containing 0.1% SDS at 60° C. (alternatively, approximately 42, 44, 46, 48, 50, 52, 54, 56, 58, 62, 64, 66, 68, 70, or about 72 degrees or more can be used) for about 30 min. The filters are then air dried and exposed to x-ray film for autoradiography. In yet another alternative protocol, washing of filters is done for 1.5 h at 55° C. in a solution containing 2×SSC, 25 mM Tris-HCl (pH 7.4), 5 mM EDTA, and 0.1% SDS. The wash solution is replaced with fresh solution and incubated an additional 1.5 h at 60° C. Filters are then blotted dry and exposed for autoradiography. If necessary, filters are washed for a third time at 65-68° C. and reexposed to film. Other conditions of low stringency which may be used are well known in the art (e.g., as employed for cross-species hybridizations). Preferably, GTS variants identified or isolated using the above methods will also encode a functionally equivalent gene product (i.e., protein, polypeptide, or domain thereof, encoding or otherwise associated with a function or structure at least partially encoded by the complementary GTS).

[0027] Additional embodiments contemplated by the present invention include any polynucleotide sequence comprising a continuous stretch of nucleotide sequence originally disclosed in, or otherwise unique to, any of the GTSs of SEQ ID NOS: 1-1,206 that are at least 8, or at least 10, or at least 14, or at least 20, or at least 30, or at least about 40, and preferably at least about 60 consecutive nucleotides up to about several hundred bases of nucleotide sequence or an entire GTS sequence. Functional equivalents of the gene products of SEQ ID NOS: 1-1,206 include naturally occurring variants of SEQ ID NOS: 1-1,206 present in other species, and mutant variants, both naturally occurring and engineered, which retain at least some of the functional activities of the gene products of SEQ ID NOS: 1-1,206.

[0028] The invention also includes degenerate variants of the claimed GTS sequences, and products encoded thereby. The invention further includes GTS derivatives wherein any of the disclosed GTSs, or GTS variants, is linked to another polynucleotide molecule, or a fragment thereof, wherein the link may be either directly or through other polynucleotides of any sequence and of a length of about 1,000 base pairs, or about 500 base pairs, or about 300 base pairs, or about 200 base pairs, or about 150 base pairs, or about 100 base pairs or about 50 base pairs, or less.

[0029] The invention also particularly includes polynucleotide molecules, including DNA, that hybridize to, and are therefore the complements of, the nucleotide sequences of the disclosed GTSs. Such hybridization conditions may be highly stringent or less highly stringent, as described above. In instances wherein the nucleic acid molecules are deoxyoligonucleotides (“DNA oligos”), highly stringent conditions may refer to, for example, washing in 6×SSC/0.05% sodium pyrophosphate at 37° C. (for oligos having 14-base DNA oligos), 48° C. (for 17-base DNA oligos), 55° C. (for 20-base DNA oligos), and 60° C. (for 23-base oligos). Similar conditions are contemplated for RNA oligos corresponding to a portion of the disclosed GTS sequences.

[0030] These nucleic acid molecules may encode or act as antisense molecules to polynucleotides comprising at least a portion of the sequences first disclosed in SEQ ID NOS: 1-1,206 that are useful, for example, to regulate the expression of genes comprising a nucleotide sequence of any of SEQ ID NOS: 1-1,206, and can also be used, for example, as antisense primers in amplification reactions of gene sequences. With respect to gene regulation, such techniques can be used to regulate, for example, developmental processes by inhibiting, enhancing, hindering, or otherwise modulating the expression of genes in target cells, or particularly in embryonic stem cells. Further, such sequences may be used as part of ribozyme and/or triple helix sequences that can be used to regulate gene expression. Optionally, genes or polynucleotides encoding the GTSs can be conditionally expressed.

[0031] Still further, such molecules may be used as components of diagnostic methods whereby, for example, the presence of a particular allele, of a gene that contains any of the sequences of SEQ ID NOS: 1-1,206 may be detected. Of particular interest is the use of the disclosed GTSs to conduct analysis of single nucleotide polymorphisms (SNPs) in the human genome, or as general or individual-specific forensic markers.

[0032] In addition to the nucleotide sequences described above, full length cDNA or gene sequences that contain any of SEQ ID NOS: 1-1,206 present in the same species and/or homologs of any of those genes present in other species can be identified and isolated by using molecular biological techniques known in the art.

[0033] In order to clone the full length cDNA sequence from any species encoding the cDNA corresponding to the entire messenger RNA or to clone variant or heterologous forms of the molecule, labeled DNA probes made from nucleic acid fragments corresponding to any of the partial cDNA disclosed herein may be used to screen a cDNA library. For example, oligonucleotides corresponding to either the 5′ or 3′ terminus of the cDNA sequence may be used to obtain longer nucleotide sequences. Briefly, the library may be plated out to yield a maximum of about 30,000 pfu for each 150 mm plate. Approximately 40 plates may be screened. The plates are incubated at 37° C. until the plaques reach a diameter of 0.25 mm or are just beginning to make contact with one another (3-8 hours). Nylon filters are placed onto the soft top agarose and after 60 seconds, the filters are peeled off and floated on a DNA denaturing solution consisting of 0.4N sodium hydroxide. The filters are then immersed in neutralizing solution consisting of 1 M Tris HCl, pH 7.5, before being allowed to air dry. The filters are prehybridized in casein hybridization buffer containing 10% dextran sulfate, 0.5 M NaCl, 50 mM Tris HCL, pH 7.5, 0.1% sodium pyrophosphate, 1% casein, 1% SDS, and denatured salmon sperm DNA at 0.5 mg/ml for 6 hours at 60° C. The radiolabelled probe is then denatured by heating to 95° C. for 2 minutes and then added to the prehybridization solution containing the filters. The filters are hybridized at 60° C. (alternatively, as in all hybridizations described herein, approximately 42, 44, 46, 48, 50, 52, 54, 56, 58, 62, 64, 66, 68, 70, or about 72 degrees or more can be used) for about 16 hours. The filters are then washed in approximately 1× wash mix (10× wash mix contains 3M NaCl, 0.6M Tris base, and 0.02M EDTA, alternatively, as with all washes described herein, 2×, 3×, 4×, 5×, 6× wash mix, or more, can be used) twice for 5 minutes each at room temperature, then in 1× wash mix containing 1% SDS at 60° C. (alternatively, as in all washes described herein, approximately 42, 44, 46, 48, 50, 52, 54, 56, 58, 62, 64, 66, 68, 70, or about 72 degrees or more can be used) for about 30 min, and finally in 0.3× wash mix (alternatively, as in all final washes described herein, approximately, 0.2×, 0.4×, 0.6×, 0.8×, 1×, or any concentration between about 2× and about 6× can be used in conjunction with a suitable wash temperature) containing 0.1% SDS at 60° C. (alternatively, approximately 42, 44, 46, 48, 50, 52, 54, 56, 58, 62, 64, 66, 68, 70, or about 72 degrees or more can be used) for about 30 min. The filters are then air dried and exposed to x-ray film for autoradiography. After developing, the film is aligned with the filters to select a positive plaque. If a single, isolated positive plaque cannot be obtained, the agar plug containing the plaques will be removed and placed in lambda dilution buffer containing 0.1M NaCl, 0.01M magnesium sulfate, 0.035M Tris HCl pH 7.5, 0.01% gelatin. The phage may then be replated and rescreened to obtain single, well isolated positive plaques. Positive plaques may be isolated and the cDNA clones sequenced using primers based on the known cDNA sequence. This step may be repeated until a full length cDNA is obtained.

[0034] It may be necessary to screen multiple cDNA libraries from different sources/tissues to obtain a full length cDNA. In the event that it is difficult to identify cDNA clones encoding the complete 5′ terminal coding region, an often encountered situation in cDNA cloning, the RACE (Rapid Amplification of cDNA Ends) technique may be used. RACE is a proven PCR-based strategy for amplifying the 5′ end of incomplete cDNAs. 5′-RACE-Ready cDNA synthesized from human fetal liver containing a unique anchor sequence is commercially available (Clontech). To obtain the 5′ end of the cDNA, PCR is carried out, for example, on 5′-RACE-Ready cDNA using the provided anchor primer and the 3′ primer. A secondary PCR reaction is then carried out using the anchored primer and a nested 3′ primer according to the manufacturer's instructions.

[0035] Once obtained, the full length cDNA sequence may be translated into amino acid sequence and examined for certain landmarks found in the amino acid sequences encoded by SEQ ID NOS: 1-1,206, or any structural similarities to these disclosed sequences.

[0036] The identification of homologs, heterologs, or paralogs of SEQ ID NOS: 1-1,206 in other, preferably related, species can be useful for developing additional animal model systems that are closely related to humans for purposes of drug discovery. Genes at other genetic loci within the genome that encode proteins which have extensive homology to one or more domains of the gene products encoded by SEQ ID NOS: 1-1,206 can also be identified via similar techniques. In the case of cDNA libraries, such screening techniques can identify clones derived from alternatively spliced transcripts in the same or different species.

[0037] Screening can be done using filter hybridization with duplicate filters. The labeled probe can contain at least 15-30 base pairs of the nucleotide sequence presented in SEQ ID NOS: 1-1,206. The hybridization washing conditions used should be of a lower stringency when the cDNA library is derived from an organism different from, or heterologous to, the type of organism from which the labeled sequence was derived. With respect to the cloning of a mammalian homolog, heterolog, ortholog, or paralog, using probes derived from any of the sequences of SEQ ID NOS: 1-1,206, for example, hybridization can, for example, be performed at 65° C. overnight in Church's buffer (7% SDS, 250 mM NaHPO₄, 2 mM EDTA, 1% BSA). Washes can be done with 2×SSC, 0.1% SDS at 65° C. and then at 0.1×SSC, 0.1% SDS at 65° C.

[0038] Low stringency conditions are well known to those of skill in the art, and will vary predictably depending on the specific organisms from which the library and the labeled sequences are derived. For guidance regarding such conditions see, for example, Sambrook et al., 1989, Molecular Cloning, A Laboratory Manual, Cold Springs Harbor Press, N.Y.; and Ausubel et al., 1989, Current Protocols in Molecular Biology, Green Publishing Associates and Wiley Interscience, N.Y.

[0039] Alternatively, the labeled nucleotide probe of a sequence of any of SEQ ID NOS: 1-1,206 may be used to screen a genomic library derived from the organism of interest, again, using appropriately stringent conditions. The identification and characterization of human genomic clones is helpful for designing diagnostic tests and clinical protocols for treating disorders in human patients that are known or suspected to be linked to disease or other development or cell differentiation disorders and abnormalities. For example, sequences derived from regions adjacent to the intron/exon boundaries of the human gene can be used to design primers for use in amplification assays to detect mutations within the exons, introns, splice sites (e.g., splice acceptor and/or donor sites), etc., that can be used in diagnostics.

[0040] Further, gene homologs can also be isolated from nucleic acid of the organism of interest by performing PCR using two oligonucleotide primers derived from SEQ ID NOS: 1-1,206, or two degenerate oligonucleotide primer pools designed on the basis of amino acid sequences within the gene products encoded by SEQ ID NOS: 1-1,206. The template for the reaction may be cDNA obtained by reverse transcription of mRNA prepared from, for example, human or non-human cell lines, cell types, or tissues, like, for example, ES cells from the organism of interest.

[0041] The PCR product may be subcloned or sequenced directly or subcloned and sequenced to ensure that the amplified sequences represent the sequences of the gene corresponding to the sequence of SEQ ID NOS: 1-1,206 of interest. The PCR fragment may then be used to isolate a full length cDNA clone by a variety of methods. For example, the amplified fragment may be labeled and used to screen a cDNA library, such as a bacteriophage cDNA library. Alternatively, the labeled fragment may be used to isolate genomic clones via the screening of a genomic library.

[0042] PCR technology may also be utilized to isolate full length cDNA sequences. For example, RNA may be isolated, following standard procedures, from an appropriate cellular source (i.e., one known, or suspected, to express the gene corresponding to the sequence of SEQ ID NOS: 1-1,206 of interest, such as, for example, ES cells). A reverse transcription reaction may be performed on the RNA using an oligonucleotide primer specific for the most 5′ end of the amplified fragment for the priming of first strand synthesis. The resulting RNA/DNA hybrid may then be “tailed” with guanines, for example, using a standard terminal transferase reaction, the hybrid may be digested with RNase H, and second strand synthesis may then be primed with a poly-C primer. Thus, cDNA sequences upstream from the amplified fragment may easily be isolated. For a review of cloning strategies which may be used, see e.g., Sambrook et al., 1989, supra. Alternatively, cDNA or genomic libraries can be screened using 5′ PCR primers that hybridize to vector sequences and 3′ PCR primers specific to the gene of interest. Typically, such primers comprise oligonucleotide “priming” sequences first disclosed in, or otherwise unique to, one of the GTSs of SEQ ID NOS: 1-1,206.

[0043] The sequence of a gene corresponding to any of the sequences of SEQ ID NOS: 1-1,206 can also be used to isolate mutant alleles of that gene. Such mutant alleles may be isolated from individuals either known or suspected to have a genotype which contributes to the disease of interest or other symptoms of developmental and cell differentiation and/or proliferation disorders and abnormalities. Mutant alleles and mutant allele products may then be utilized in the therapeutic and diagnostic programs described below. Additionally, such sequences of any of the genes corresponding to SEQ ID NOS: 1-1,206 can be used to detect gene regulatory (e.g., promoter or promoter/enchanter) defects which can affect development or cell differentiation.

[0044] A cDNA of a mutant gene corresponding to any of the sequences of SEQ ID NOS: 1-1,206 can be isolated as discussed above, or, for example, by using PCR. In this case, the first cDNA strand may be synthesized by hybridizing an oligo-dT oligonucleotide to mRNA isolated from cells derived from an individual suspected of carrying a mutant gene corresponding to any of the sequences of SEQ ID NOS: 1-1,206 by extending the new strand with reverse transcriptase. The second strand of the cDNA is then synthesized using an oligonucleotide that hybridizes specifically to the 5′ region of the normal gene. The amplified product can be directly sequenced or cloned into a suitable vector and subsequently subjected to DNA sequence analysis. By comparing the DNA sequence of the mutant allele to that of the normal allele, the mutation(s) responsible for the loss or alteration of function of the mutant gene product can be ascertained.

[0045] Alternatively, a genomic library can be constructed using DNA obtained from one or more individuals suspected of carrying, or known to carry, a mutant allele corresponding to any of SEQ ID NOS: 1-1,206. Corresponding mutant cDNA libraries can be also constructed using RNA from cell types known, or suspected, to express such mutant alleles. The corresponding normal gene, or any suitable fragment thereof, may then be labeled and used as a probe to identify the corresponding mutant allele in such libraries. Clones containing the mutant gene sequences may then be identified and analyzed by DNA sequence analysis. Additionally, a protein expression library can be constructed utilizing cDNA synthesized from, for example, RNA isolated from a cell type known, or suspected, to express a mutant allele corresponding to any of the sequences of SEQ ID NOS: 1-1,206 from an individual suspected of, carrying or known to carry, such a mutant allele. In this manner, gene products made by the putatively mutant cell type may be expressed and screened using standard antibody screening techniques in conjunction with antibodies raised against the corresponding normal gene product or a portion thereof, as described below in Section 5.4 (For screening techniques, see, for example, Harlow, E. and Lane, eds., 1988, “Antibodies: A Laboratory Manual”, Cold Spring Harbor Press, Cold Spring Harbor.) Additionally, screening can be accomplished by screening with labeled fusion proteins. In cases where a mutation results in an expressed gene product with altered function (e.g., as a result of a missense or a frame shift mutation), a polyclonal set of antibodies to the wild-type gene product are likely to cross-react with the mutant gene product. Library clones detected via their reaction with such labeled antibodies can be purified and subjected to sequence analysis according to methods well known to those of skill in the art.

[0046] The invention also encompasses nucleotide sequences that encode mutant isoforms of any of the amino acid sequences encoded by the GTSs of SEQ ID NOS: 1-1,206, peptide fragments thereof, truncated versions thereof, and fusion proteins including any of the above. Examples of such fusion proteins can include, but not limited to, an epitope tag which aids in purification or detection of the resulting fusion protein; or an enzyme, fluorescent protein, luminescent protein which can be used as a marker.

[0047] The present invention additionally encompasses (a) RNA or DNA vectors that contain any portion of SEQ ID NOS: 1-1,206 and/or their complements as well as any of the peptides or proteins encoded thereby; (b) DNA vectors that contain a cDNA that substantially spans the entire open reading frame corresponding to any of the sequences of SEQ ID NOS: 1-1,206 and/or their complements; (c) DNA expression vectors that contain any of the foregoing sequences, or a portion thereof, operatively associated with a (d) genetically engineered host cells that contain a cDNA that spans the entire open reading frame, or any portion thereof, corresponding to any of the sequences of SEQ ID NOS: 1-1,206 operatively associated with a regulatory element, generally recombinantly positioned either in vivo (such as in gene activation) or in vitro, that directs the expression of the GTS coding sequences in the host cell. As used herein, regulatory elements include but are not limited to inducible and non-inducible promoters, enhancers, operators and other elements known to those skilled in the art that drive and regulate expression. Such regulatory elements include but are not limited to the baculovirus promoter, cytomegalovirus hCMV immediate early gene promoter, the early or late promoters of SV40 adenovirus, the lac system, the trp system, the TAC system, the TRC system, the major operator and promoter regions of phage A, the control regions of fd coat protein, acid phosphatase promoters, phosphoglycerate kinase (PGK) and especially 3-phosphoglycerate kinase promoters, and yeast alpha mating factors.

[0048] Because the described GTSs represent cellular exon sequence that has been recognized and spliced by the cellular splicing machinery, each GTS further identifies at least one exon and/or exon splice junctions that is useful, and in many cases necessary, for chromosome mapping and the analysis and practical application of genomic DNA sequence data.

### 5.2 Proteins and Polypeptides Encoded by Polynucleotides Express in Mouse ES Cells

[0049] Peptides and proteins encoded by the open reading frame of mRNAs corresponding to SEQ ID NOS: 1-1,206, polypeptides and peptide fragments, mutated, truncated or deleted forms of those peptides and proteins, fusion proteins containing any of those peptides and proteins can be prepared for a variety of uses, including but not limited to, the generation of antibodies, as reagents in diagnostic assays, the identification of other cellular gene products involved in the regulation of development and cellular differentiation of various cell types, like, for example, ES cells, as reagents in assays for screening for compounds that can be used in the treatment of disorders affecting development and cell differentiation, and as pharmaceutical reagents useful in the treatment of disorders affecting development and cell differentiation.

[0050] The invention also encompasses proteins, peptides, and polypeptides that are functionally equivalent to those encoded by SEQ ID NOS: 1-1,206. Such functionally equivalent products include, but are not limited to, additions or substitutions of amino acid residues within the amino acid sequence encoded by the nucleotide sequences described above, but which result in a silent change, thus producing a functionally equivalent gene product. Amino acid substitutions can be made on the basis of similarity in polarity, charge, solubility, hydrophobicity, hydrophilicity, and/or the amphipathic nature of the residues involved. For example, nonpolar (hydrophobic) amino acids include alanine, leucine, isoleucine, valine, proline, phenylalanine, tryptophan, and methionine; polar neutral amino acids include glycine, serine, threonine, cysteine, tyrosine, asparagine, and glutamine; positively charged (basic) amino acids include arginine, lysine, and histidine; and negatively charged (acidic) amino acids include aspartic acid and glutamic acid.

[0051] While random mutations can be introduced into DNA encoding peptides and proteins of the current invention (using random mutagenesis techniques well known to those skilled in the art), and the resulting mutant peptides and proteins tested for activity, site-directed mutations of the coding sequence can be engineered (using standard site-directed mutagenesis techniques) to generate mutant peptides and proteins of the current invention having increased functionality.

[0052] For example, the novel amino acid sequence of peptides and proteins at least partially encoded by the GTSs of the current invention can be aligned with homologs from different species. Mutant peptides and proteins can be engineered so that regions of interspecies identity are maintained, whereas the variable residues are altered, e.g., by deletion or insertion of an amino acid residue(s) or by substitution of one or more different amino acid residues. Conservative alterations at the variable positions can be engineered in order to produce a mutant form of a peptide or protein of the current invention that retains function. Non-conservative changes can be engineered at these variable positions to alter function. Alternatively, where alteration of function is desired, deletion or non-conservative alterations of the conserved regions can be engineered. One of skill in the art may easily test such mutant or deleted form of a peptide or protein of the current invention for these alterations in function using the teachings presented herein.

[0053] Other mutations to the coding sequences described above can be made to generate peptides and proteins that are better suited for expression, scale up, etc. in the host cells chosen. For example, the triplet code for each amino acid can be modified to conform more closely to the preferential codon usage of the host cell's translational machinery, or, for example, to yield a messenger RNA molecule with a longer half-life. Those skilled in the art would readily know what modifications of the nucleotide sequence would be desirable to conform the nucleotide sequence to preferential codon usage or to make the messenger RNA more stable. Such information would be obtainable, for example, through use of computer programs, through review of available research data on codon usage and messenger RNA stability, and through other means known to those of skill in the art.

[0054] Peptides corresponding to one or more domains (or a portion of a domain) of one of the proteins described above, truncated or deleted proteins, as well as fusion proteins in which the full length protein described above, a subunit peptide or truncated version is fused to an unrelated protein are also within the scope of the invention and can be designed by those of skill in the art on the basis of experimental or functional considerations. Such fusion proteins include but are not limited to fusions to an epitope tag; or fusions to an enzyme, fluorescent protein, or luminescent protein which provide a marker function.

[0055] While the peptides and proteins of the current invention can be chemically synthesized (e.g., see Creighton, 1983, Proteins: Structures and Molecular Principles, W. H. Freeman & Co., N.Y.), large polypeptides derived from any of the polynucleotides described above may advantageously be produced by recombinant DNA technology using techniques well known in the art for expressing genes and/or coding sequences. These methods include, for example, in vitro recombinant DNA techniques, synthetic techniques, and in vivo genetic recombination. See, for example, the techniques described in Sambrook et al., 1989, supra, and Ausubel et al., 1989, supra. Alternatively, RNA capable of encoding any of the nucleotide sequences described above may be chemically synthesized using, for example, synthesizers. See, for example, the techniques described in “Oligonucleotide Synthesis”, 1984, Gait, M. J. ed., IRL Press, Oxford, which is incorporated by reference herein in its entirety.

[0056] A variety of host-expression vector systems may be utilized to express the nucleotide sequences of the invention. Where the peptide or protein to be synthesized is a soluble derivative, the peptide or polypeptide can be recovered from the culture, i.e., from the host cell in cases where the peptide or polypeptide is not secreted, and from the culture media in cases where the peptide or polypeptide is secreted by the cells. However, such engineered host cells themselves may be used in situations where it is important not only to retain the structural and functional characteristics of the expressed peptide or protein, but to assess biological activity, e.g., in drug screening assays.

[0057] The expression systems that may be used for purposes of the invention include but are not limited to microorganisms such as bacteria (e.g., E. coli, B. subtilis) transformed with recombinant bacteriophage DNA, plasmid DNA or cosmid DNA expression vectors containing a nucleotide sequence of the current invention; yeast (e.g., Saccharomyces, Pichia, etc.) transformed with recombinant yeast expression vectors containing a nucleotide sequence of the current invention; insect cell systems infected with recombinant virus expression vectors (e.g., baculovirus) containing a nucleotide sequence of the current invention; plant cell systems infected with recombinant virus expression vectors (e.g., cauliflower mosaic virus, CaMV; tobacco mosaic virus, TMV) or transformed with recombinant plasmid expression vectors (e.g., Ti plasmid) containing a nucleotide sequence of the current invention; or mammalian cell systems (e.g., COS, CHO, BHK, 293, 3T3, U937) harboring recombinant expression constructs containing promoters derived from the genome of mammalian cells (e.g., metallothionein promoter) or from mammalian viruses (e.g., the adenovirus late promoter; the vaccinia virus 7.5K promoter).

[0058] In bacterial systems, a number of expression vectors may be advantageously selected depending upon the use intended for the gene product being expressed. For example, when large quantities of such a protein are to be produced for the generation of pharmaceutical compositions of a protein or for raising antibodies to the protein to be expressed, for example, vectors which direct the expression of high levels of fusion protein products that are readily purified may be desirable. Such vectors include, but are not limited, to the E. coli expression vector pUR278 (Ruther et al., 1983, EMBO J. 2:1791), in which the coding sequence of the polynucleotide to be expressed may be ligated individually into the vector in frame with the lacZ coding region so that a fusion protein is produced; pIN vectors (Inouye & Inouye, 1985, Nucleic Acids Res. 13:3101-3109; Van Heeke & Schuster, 1989, J. Biol. Chem. 264:5503-5509); and the like. pGEX vectors may also be used to express foreign polypeptides as fusion proteins with glutathione S-transferase (GST). If the inserted sequence encodes a relatively small polypeptide (less than 25 kD), such fusion proteins are generally soluble and can easily be purified from lysed cells by adsorption to glutathione-agarose beads followed by elution in the presence of free glutathione. The pGEX vectors are designed to include thrombin or factor Xa protease cleavage sites so that the cloned target gene product can be released from the GST moiety. Alternatively, if the resulting fusion protein is insoluble and forms inclusion bodies in the host cell, the inclusion bodies may be purified and the recombinant protein solubilized using techniques well known to one of skill in the art.

[0059] In an insect system, Autographa californica nuclear polyhidrosis virus (AcNPV) may be used as a vector to express foreign genes. (e.g., see Smith et al., 1983, J. Virol. 46: 584; Smith, U.S. Pat. No. 4,215,051). In one embodiment of the current invention, Sf9 insect cells are infected with a baculovirus vector expressing a peptide or protein of the current invention.

[0060] In mammalian host cells, a number of viral-based expression systems may be utilized. Specific embodiments described more fully below express tagged cDNA sequences of the current invention using a CMV promoter to transiently express recombinant protein in U937 cells or in Cos-7 cells. Alternatively, retroviral vector systems well known in the art may be used to insert the recombinant expression construct into host cells.

[0061] In yeast, a number of vectors containing constitutive or inducible promoters may be used. For a review, see Current Protocols in Molecular Biology, Vol. 2, 1988, Ed. Ausubel et al., Greene Publish. Assoc. & Wiley Interscience, Ch. 13; Grant et al., 1987, Expression and Secretion Vectors for Yeast, in Methods in Enzymology, Eds. Wu & Grossman, 1987, Acad. Press, N.Y., Vol. 153, pp. 516-544; Glover, 1986, DNA Cloning, Vol. II, IRL Press, Wash., D.C., Ch. 3; and Bitter, 1987, Heterologous Gene Expression in Yeast, Methods in Enzymology, Eds. Berger & Kimmel, Acad. Press, N.Y., Vol. 152, pp. 673-684; and The Molecular Biology of the Yeast Saccharomyces, 1982, Eds. Strathern et al., Cold Spring Harbor Press, Vols. I and II.

[0062] In cases where plant expression vectors are used, the expression of the coding sequence may be driven by any of a number of promoters. For example, viral promoters such as the 35S RNA and 19S RNA promoters of CaMV (Brisson et al., 1984, Nature, 310:511-514), or the coat protein promoter of TMV (Takamatsu et al., 1987, EMBO J. 6:307-311) may be used; alternatively, plant promoters such as the small subunit of RUBISCO (Coruzzi et al., 1984, EMBO J. 3:1671-1680; Broglie et al., 1984, Science 224:838-843); or heat shock promoters, e.g., soybean hsp17.5-E or hsp17.3-B (Gurley et al., 1986, Mol. Cell. Biol. 6:559-565) may be used. These constructs can be introduced into plant cells using Ti plasmids, Ri plasmids, plant virus vectors, direct DNA transformation, microinjection, electroporation, etc. For reviews of such techniques see, for example, Weissbach & Weissbach, 1988, Methods for Plant Molecular Biology, Academic Press, NY, Section VIII, pp. 421-463; and Grierson & Corey, 1988, Plant Molecular Biology, 2d Ed., Blackie, London, Ch. 7-9.

[0063] In cases where an adenovirus is used as an expression vector, the nucleotide sequence of interest may be ligated to an adenovirus transcription/translation control complex, e.g., the late promoter and tripartite leader sequence. This chimeric gene may then be inserted in the adenovirus genome by in vitro or in vivo recombination. Insertion in a non-essential region of the viral genome (e.g., region E1 or E3) will result in a recombinant virus that is viable and capable of expressing the gene product of interest in infected hosts. (e.g., See Logan & Shenk, 1984, Proc. Natl. Acad. Sci. USA 81:3655-3659). Specific initiation signals may also be required for efficient translation of inserted nucleotide sequences of interest. These signals include the ATG initiation codon and adjacent sequences. In cases where an entire gene or cDNA, including its own initiation codon and adjacent sequences, is inserted into the appropriate expression vector, no additional translational control signals may be needed. However, in cases where only a portion of a coding sequence of interest is inserted, exogenous translational control signals, including, perhaps, the ATG initiation codon, must be provided. Furthermore, the initiation codon must be in phase with the reading frame of the desired coding sequence to ensure translation of the entire insert. These exogenous translational control signals and initiation codons can be of a variety of origins, both natural and synthetic. The efficiency of expression may be enhanced by the inclusion of appropriate transcription enchanter elements, transcription terminators, etc. (See Bittner et al., 1987, Methods in Enzymol. 153:516-544).

[0064] In addition, a host cell strain may be chosen which modulates the expression of the inserted sequences, or modifies and processes the gene product in the specific fashion desired. Such modifications (e.g., glycosylation) and processing (e.g., cleavage) of protein products may be important for the function of the protein. Different host cells have characteristic and specific mechanisms for the post-translational processing and modification of proteins and gene products. Appropriate cell lines or host systems can be chosen to ensure the correct modification and processing of the foreign protein expressed. To this end, eukaryotic host cells which possess the cellular machinery for proper processing of the primary transcript may be used. Such mammalian host cells include but are not limited to CHO, VERO, BHK, HeLa, COS, MDCK, 293, 3T3, WI38, and U937 cells.

[0065] For long-term, high-yield production of recombinant proteins, stable expression is preferred. For example, cell lines which stably express the sequences of interest described above may be engineered. Rather than using expression vectors which contain viral origins of replication, host cells can be transformed with DNA controlled by appropriate expression control elements (e.g., promoter, enhancer sequences, transcription terminators, polyadenylation sites, etc.), and a selectable marker. Following the introduction of the foreign DNA, engineered cells may be allowed to grow for 1-2 days in an enriched media, and then are switched to a selective media. The selectable marker in the recombinant plasmid confers resistance to the selection and allows cells to stably integrate the plasmid into their chromosomes and grow to form foci which in turn can be cloned and expanded into cell lines. This method may advantageously be used to engineer cell lines which express the gene product of interest. Such engineered cell lines may be particularly useful in screening and evaluation of compounds that affect the endogenous activity of the gene product of interest.

[0066] A number of selection systems may be used, including but not limited to the herpes simplex virus thymidine kinase (Wigler et al., 1977, Cell 11:223), hypoxanthine-guanine phosphoribosyltransferase (Szybalska & Szybalski, 1962, Proc. Natl. Acad. Sci. USA 48:2026), and adenine phosphoribosyltransferase (Lowy et al., 1980, Cell 22:817) genes can be employed in tk⁻, hgprt⁻ or aprt⁻ cells, respectively. Also, antimetabolite resistance can be used as the basis of selection for the following genes: dhfr, which confers resistance to methotrexate (Wigler et al., 1980, Natl. Acad. Sci. USA 77:3567; O'Hare et al., 1981, Proc. Natl. Acad. Sci. USA 78:1527); gpt, which confers resistance to mycophenolic acid (Mulligan & Berg, 1981, Proc. Natl. Acad. Sci. USA 78:2072); neo, which confers resistance to the aminoglycoside G-418 (Colberre-Garapin et al., 1981, J. Mol. Biol. 150:1); and hygro, which confers resistance to hygromycin (Santerre et al., 1984, Gene 30:147).

[0067] The novel gene products/peptide sequences encoded by the described novel GTSs are also useful as epitope tags for the antigenic or other tagging of proteins and polypeptides that have been engineered to incorporate or comprise at least a portion of an GTS peptide sequence.

[0068] The gene products of interest can also be expressed in transgenic animals. Animals of any species, including, but not limited to, mice, rats, rabbits, guinea pigs, pigs, micro-pigs, goats, and non-human primates, e.g., baboons, monkeys, and chimpanzees may be used to generate transgenic animals carrying the polynucleotide of interest of the current invention.

[0069] Any technique known in the art may be used to introduce the transgene of interest into animals to produce the founder lines of transgenic animals. Such techniques include, but are not limited to pronuclear microinjection (Hoppe, P. C. and Wagner, T. E., 1989, U.S. Pat. No. 4,873,191); retrovirus mediated gene transfer into germ lines (Van der Putten et al., 1985, Proc. Natl. Acad. Sci., USA 82:6148-6152); gene targeting in embryonic stem cells (Thompson et al., 1989, Cell 56:313-321); electroporation of embryos (Lo, 1983, Mol Cell. Biol. 3:1803-1814); sperm-mediated gene transfer (Lavitrano et al., 1989, Cell 57:717-723); positive-negative selection as described in U.S. Pat. No. 5,464,764 herein incorporated by reference. For a review of such techniques, see Gordon, 1989, Transgenic Animals, Intl. Rev. Cytol. 115:171-229, which is incorporated by reference herein in its entirety.

[0070] The present invention provides for transgenic animals that carry the transgene of interest in all their cells, as well as animals which carry the transgene in some, but not all their cells, i.e., mosaic animals. The transgene may be integrated as a single transgene or in concatamers, e.g., head-to-head tandems or head-to-tail tandems. The transgene may also be selectively introduced into and activated in a particular cell type by following, for example, the teaching of Lasko et al. (Lasko, M. et al., 1992, Proc. Natl. Acad. Sci. USA 89:6232-6236). The regulatory sequences required for such a cell-type specific activation will depend upon the particular cell type of interest, and will be apparent to those of skill in the art. When it is desired that the transgene of interest be integrated into the chromosomal site of the endogenous copy of that same gene, gene targeting is preferred. Briefly, when such a technique is to be utilized, vectors containing some nucleotide sequences homologous to the endogenous gene of interest are designed for the purpose of integrating, via homologous recombination with chromosomal sequences, into and disrupting the function of the nucleotide sequence of the endogenous gene of interest. In this way, the expression of the endogenous gene may also be eliminated by inserting non-functional sequences into the endogenous gene. The transgene may also be selectively introduced into a particular cell type, thus inactivating the endogenous gene of interest in only that cell type, by following, for example, the teaching of Gu et al. (Gu et al., 1994, Science 265: 103-106). The regulatory sequences required for such a cell-type specific inactivation will depend upon the particular cell type of interest, and will be apparent to those of skill in the art.

[0071] Once transgenic animals have been generated, the expression of the recombinant gene of interest may be assayed utilizing standard techniques. Initial screening may be accomplished by Southern blot analysis or PCR techniques to analyze animal tissues to assay whether integration of the transgene has taken place. The level of mRNA expression of the transgene in the tissues of the transgenic animals may also be assessed using techniques which include but are not limited to Northern blot analysis of cell type samples obtained from the animal, in situ hybridization analysis, and RT-PCR. Samples of gene-expressing tissue, can also be evaluated immunocytochemically using antibodies specific for the transgene product, as described below.

### 5.3 Cells that Contain a Disrupted Allele of a Gene Encoding a Polpynucleotide Current Invention

[0072] Another aspect of the current invention are cells which contain a gene that encodes a polynucleotide of the current invention and that has been disrupted. Those of skill in the art would know how to disrupt a gene in a cell using techniques known in the art. Also, techniques useful to disrupt a gene in a cell and especially an ES cell, that may already be disrupted, as disclosed in copending U.S. patent applications Nos. 08/726,867; 08/728,963; 08/907,598; and 08/942,806, all of which are hereby incorporated herein by reference in their entirety, are within the scope of the current invention to disrupt a gene that encodes a polynucleotide of the current invention.

### 5.3.1 Identification of Cells that Express Genes Encoding Polynucleotides of the Current Invention

[0073] Host cells that contain coding sequence and/or express a biologically active gene product, or fragment thereof, encoded by gene corresponding to an GTS of the present invention may be identified by at least four general approaches; (a) DNA-DNA or DNA-RNA hybridization; (b) the presence or absence of “marker” gene functions; (c) assessing the level of transcription as measured by the expression of mRNA transcripts in the host cell; and (d) detection of the gene product as measured by immunoassay, enzymatic assay, chemical assay, or by its biological activity. Prior to screening for gene expression, the host cells can first be treated in an effort to increase the level of expression of genes encoding polynucleotides of the current invention, especially in cell lines that produce low amounts of the mRNAs and/or peptides and proteins of the current invention.

[0074] In the first approach, the presence of the coding sequence for peptides and proteins of the current invention inserted in the expression vector can be detected by DNA-DNA or DNA-RNA hybridization using probes comprising nucleotide sequences that are homologous to the coding sequence for peptides and proteins of the current invention, respectively, or portions or derivatives thereof.

[0075] In the second approach, the recombinant expression vector/host system can be identified and selected based upon the presence or absence of certain “marker” gene functions (e.g., thymidine kinase activity, resistance to antibiotics, resistance to methotrexate, transformation phenotype, occlusion body formation in baculovirus, etc.). For example, if the coding sequence for the peptide or protein of the current invention is inserted within a marker gene sequence of the vector, recombinants containing the coding sequence for the peptide or protein of the current invention can be identified by the absence of marker gene function. Alternatively, a marker gene can be placed in tandem with the sequence for the peptide or protein of the current invention under the control of the same or different promoter used to control the expression of the coding sequence for the peptide or protein of the current invention. Expression of the marker in response to induction or selection indicates expression of the coding sequence for the peptide or protein of the current invention.

[0076] In the third approach, transcriptional activity for the coding region of genes specific for peptides and proteins of the current invention can be assessed by hybridization assays. For example, RNA can be isolated and analyzed by Northern blot using a probe derived from a GTS, or any portion thereof. Alternatively, total nucleic acids of the host cell may be extracted and assayed for hybridization to such probes. Additionally, RT-PCR (using GTS specific oligos/products) may be used to detect low levels of gene expression in a sample, or in RNA isolated from a spectrum of different tissues, or PCR can be used can be used to screen a variety of cDNA libraries derived from different tissues to determine which tissues express a given GTS.

[0077] In the fourth approach, the expression of the peptides and proteins of the current invention can be assessed immunologically, for example by Western blots, immunoassays such as radioimmuno-precipitation, enzyme-linked immunoassays and the like. This can be achieved by using an antibody and a binding partner specific to a peptide or protein of the current invention.

### 5.4 Antibodies to Proteins of the Current Invention

[0078] Antibodies that specifically recognize one or more epitopes of a peptide or protein encoded by the GTSs of the present invention, or epitopes of conserved variants of these peptides or proteins, or any and all peptide fragments thereof are also encompassed by the invention. Such antibodies include but are not limited to polyclonal antibodies, monoclonal antibodies (mAbs), humanized or chimeric antibodies, single chain antibodies, Fab fragments, F(ab′)₂ fragments, fragments produced by a Fab expression library, anti-idiotypic (anti-Id) antibodies, and epitope-binding fragments of any of the above.

[0079] The antibodies of the invention may be used, for example, in the detection of the peptide or protein of interest of the current invention in a biological sample and may, therefore, be utilized as part of a diagnostic or prognostic technique whereby patients may be tested for abnormal amounts of these proteins. Such antibodies may also be utilized in conjunction with, for example, compound screening schemes as described, below in Section 5.6 for the evaluation of the effect of test compounds on expression and/or activity of the gene products of interest of the current invention. Additionally, such antibodies can be used in conjunction with the gene therapy and gene delivery techniques described below to, for example, evaluate the normal and/or engineered peptide- or protein-expressing cells prior to their introduction into the patient. Such antibodies may additionally be used in a method for inhibiting the abnormal activity of a peptide or protein of interest of the current invention. Thus, such antibodies may, for example, be utilized as part of treatment methods for development and cell differentiation disorders.

[0080] For the production of antibodies, various host animals may be immunized by injection with the peptide or protein of interest, a subunit peptide of such protein, a truncated polypeptide, functional equivalents of the peptide or protein, mutants of the peptide or protein, or denatured forms of the above. Such host animals may include but are not limited to rabbits, mice, and rats, to name but a few. Various adjuvants may be used to increase the immunological response, depending on the host species, including but not limited to Freund's adjuvant (complete and incomplete), mineral salts such as aluminum hydroxide or aluminum phosphate, surface active substances such as lysolecithin, pluronic polyols, polyanions, peptides, oil emulsions, and potentially useful human adjuvants such as BCG (bacille Calmette-Guerin) and Corynebacterium parvum. Alternatively, the immune response could be enhanced by combination and or coupling with molecules such as keyhole limpet hemocyanin, tetanus toxoid, diptheria toxoid, ovalbumin, cholera toxin or fragments thereof. Polyclonal antibodies are heterogeneous populations of antibody molecules derived from the sera of the immunized animals.

[0081] Monoclonal antibodies, which are homogeneous populations of antibodies to a particular antigen, may be obtained by any technique which provides for the production of antibody molecules by continuous cell lines in culture. These include, but are not limited to, the hybridoma technique of Kohler and Milstein, (1975, Nature 256:495-497; and U.S. Pat. No. 4,376,110), the human B-cell hybridoma technique (Kosbor et al., 1983, Immunology Today 4:72; Cole et al., 1983, Proc. Natl. Acad. Sci. USA 80:2026-2030), and the EBV-hybridoma technique (Cole et al., 1985, Monoclonal Antibodies And Cancer Therapy, Alan R. Liss, Inc., pp. 77-96). Such antibodies may be of any immunoglobulin class including IgG, IgM, IgE, IgA, IgD and any subclass thereof. The hybridoma producing the mAb of this invention may be cultivated in vitro or in vivo. Production of high titers of mabs in vivo makes this the presently preferred method of production.

[0082] In addition, techniques developed for the production of “chimeric antibodies” (Morrison et al., 1984, Proc. Natl. Acad. Sci. USA, 81:6851-6855; Neuberger et al., 1984, Nature, 312:604-608; Takeda et al., 1985, Nature, 314:452-454) by splicing the genes from a mouse antibody molecule of appropriate antigen specificity together with genes from a human antibody molecule of appropriate biological activity can be used. A chimeric antibody is a molecule in which different portions are derived from different animal species, such as those having a variable region derived from a porcine mAb and a human immunoglobulin constant region. Such technologies are described in U.S. Pat. Nos. 6,075,181 and 5,877,397 and their respective disclosures which are herein incorporated by reference in their entirety.

[0083] Alternatively, techniques described for the production of single chain antibodies (U.S. Pat. No. 4,946,778; Bird, 1988, Science 242:423-426; Huston et al., 1988, Proc. Natl. Acad. Sci. USA 85:5879-5883; and Ward et al., 1989, Nature 334:544-546) can be adapted to produce single chain antibodies against gene products of interest. Single chain antibodies are formed by linking the heavy and light chain fragments of the Fv region via an amino acid bridge, resulting in a single chain polypeptide.

[0084] Antibody fragments which recognize specific epitopes may be generated by known techniques. For example, such fragments include but are not limited to: the F(ab′)₂ fragments which can be produced by pepsin digestion of the antibody molecule and the Fab fragments which can be generated by reducing the disulfide bridges of the F(ab′)₂ fragments. Alternatively, Fab expression libraries may be constructed (Huse et al., 1989, Science, 246:1275-1281) to allow rapid and easy identification of monoclonal Fab fragments with the desired specificity.

[0085] Antibodies to peptides and proteins of interest that fully or at least partially encoded by GTSs of the current invention or fragments or truncated versions thereof, can, in turn, be utilized to generate anti-idiotypic antibodies that “mimic” an epitope of the peptide or protein of interest, using techniques well known to those skilled in the art. (See, e.g., Greenspan & Bona, 1993, FASEB J 7(5):437-444; and Nissinoff, 1991, J. Immunol. 147(8):2429-2438). For example antibodies that bind to a regulatory peptide or protein of interest of the current invention and competitively inhibit the binding of such peptide or protein to any of its binding partners in the cell can be used to generate anti-idiotypes that “mimic” the peptide or protein of interest and, therefore, bind and neutralize the particular binding partner of the peptide or protein of interest. Such neutralizing anti-idiotypes or Fab fragments of such anti-idiotypes can be used in therapeutic regimens to neutralize a particular binding partner of a peptide or protein of interest which play a role in development and cell differentiation processes.

### 5.5 Diagnosis of Disorders Affecting Development and Cell Differentiation

[0086] A variety of methods can be employed for the diagnostic and prognostic evaluation of disorders involving developmental and differentiation processes, and for the identification of subjects having a predisposition to such disorders.

[0087] Such methods may, for example, utilize reagents such as the nucleotide sequences described above, and antibodies to peptides and proteins of the current invention, as described, in Section 5.4. Specifically, such reagents may be used, for example, for: (1) the detection of the presence of gene mutations, or the detection of either over- or under-expression of the respective mRNAs relative to the non-disorder state; (2) the detection of either an over- or an under-abundance of the respective gene product relative to the non-disorder state; and (3) the detection of perturbations or abnormalities in the intra- and inter-cellular processes mediated by the respective peptides or proteins of the current invention.

[0088] The methods described herein may be performed, for example, by utilizing pre-packaged diagnostic kits comprising at least one specific nucleotide sequence of the current invention or antibody reagent described herein, which may be conveniently used, e.g., in clinical settings, to diagnose patients exhibiting developmental or cell differentiation disorder abnormalities.

[0089] For the detection of mutations in any of the genes described above, any nucleated cell can be used as a starting source for genomic nucleic acid. For the detection of gene expression or gene products, any cell type or tissue in which the gene of interest is expressed, such as, for example, ES cells, may be utilized. Specific examples of cells and tissues that can be'analyzed using the claimed polynucleotides include, but are not limited to, endothelial cells, epithelial cells, islets, neurons or neural tissue, mesothelial cells, osteocytes, lymphocytes, chondrocytes, hematopoietic cells, immune cells, cells of the major glands or organs (e.g., lung, heart, stomach, pancreas, kidney, skin, etc.), exocrine and/or endocrine cells, embryonic and other stem cells, fibroblasts, and culture adapted and/or transformed versions of the above. Diseases or natural processes that can also be correlated with the expression of mutant, or normal, variants of the disclosed GTSs include, but are not limited to, aging, cancer, autoimmune disease, lupus, scleroderma, Crohn's disease, multiple sclerosis, inflammatory bowel disease, immune disorders, schizophrenia, psychosis, alopecia, glandular disorders, inflammatory disorders, ataxia telangiectasia, diabetes, skin disorders such as acne, eczema, and the like, osteo and rheumatoid arthritis, high blood pressure, atherosclerosis, cardiovascular disease, pulmonary disease, degenerative diseases of the neural or skeletal systems, Alzheimer's disease, Parkinson's disease, osteoporosis, asthma, developmental disorders or abnormalities, genetic birth defects, infertility, epithelial ulcerations, and viral, parasitic, fungal, yeast, or bacterial infection.

[0090] Primary, secondary, or culture adapted variants of cancer cells/tissues can also be analyzed using the claimed polynucleotides. Examples of such cancers include, but are not limited to, Cardiac: sarcoma (angiosarcoma, fibrosarcoma, rhabdomyosarcoma, liposarcoma), myxoma, rhabdomyoma, fibroma, lipoma and teratoma; Lung: bronchogenic carcinoma (squamous cell, undifferentiated small cell, undifferentiated large cell, adenocarcinoma), alveolar (bronchiolar) carcinoma, bronchial adenoma, sarcoma, lymphoma, chondromatous hamartoma, mesothelioma; Gastrointestinal: esophagus (squamous cell carcinoma, adenocarcinoma, leiomyosarcoma, lymphoma), stomach (carcinoma, lymphoma, leiomyosarcoma), pancreas (ductal adenocarcinoma, insulinoma, glucagonoma, gastrinoma, carcinoid tumors, vipoma), small bowel (adenocarcinoma, lymphoma, carcinoid tumors, Karposi's sarcoma, leiomyoma, hemangioma, lipoma, neurofibroma, fibroma), large bowel (adenocarcinoma, tubular adenoma, villous adenoma, hamartoma, leiomyoma); Genitourinary tract: kidney (adenocarcinoma, Wilm's tumor [nephroblastoma], lymphoma, leukemia), bladder and urethra (squamous cell carcinoma, transitional cell carcinoma, adenocarcinoma), prostate (adenocarcinoma, sarcoma), testis (seminoma, teratoma, embryonal carcinoma, teratocarcinoma, choriocarcinoma, sarcoma, interstitial cell carcinoma, fibroma, fibroadenoma, adenomatoid tumors, lipoma); Liver: hepatoma (hepatocellular carcinoma), cholangiocarcinoma, hepatoblastoma, angiosarcoma, hepatocellular adenoma, hemangioma; Bone: osteogenic sarcoma (osteosarcoma), fibrosarcoma, malignant fibrous histiocytoma, chondrosarcoma, Ewing's sarcoma, malignant lymphoma (reticulum cell sarcoma), multiple myeloma, malignant giant cell tumor, chordoma, osteochronfroma (osteocartilaginous exostoses), benign chondroma, chondroblastoma, chondromyxofibroma, osteoid osteoma and giant cell tumors; Nervous system: skull (osteoma, hemangioma, granuloma, xanthoma, osteitis deformans), meninges (meningioma, meningiosarcoma, gliomatosis), brain (astrocytoma, medulloblastoma, glioma, ependymoma, germinoma [pinealoma], glioblastoma multiforme, oligodendroglioma, schwannoma, retinoblastoma, congenital tumors), spinal cord (neurofibroma, meningioma, glioma, sarcoma); Gynecological: uterus (endometrial carcinoma), cervix (cervical carcinoma, pre-tumor cervical dysplasia), ovaries (ovarian carcinoma [serous cystadenocarcinoma, mucinous cystadenocarcinoma, endometrioid tumors, celioblastoma, clear cell carcinoma, unclassified carcinoma], granulosa-thecal cell tumors, Sertoli-Leydig cell tumors, dysgerminoma, malignant teratoma), vulva (squamous cell carcinoma, intraepithelial carcinoma, adenocarcinoma, fibrosarcoma, melanoma), vagina (clear cell carcinoma, squamous cell carcinoma, botryoid sarcoma [embryonal rhabdomyosarcoma], fallopian tubes (carcinoma); Hematologic: blood (myeloid leukemia [acute and chronic], acute lymphoblastic leukemia, chronic lymphocytic leukemia, myeloproliferative diseases, multiple myeloma, myelodysplastic syndrome), Hodgkin's disease, non-Hodgkin's lymphoma [malignant lymphoma]; Skin: malignant melanoma, basal cell carcinoma, squamous cell carcinoma, Karposi's sarcoma, moles, dysplastic nevi, lipoma, angioma, dermatofibroma, keloids, psoriasis; Breast: carcinoma and sarcoma, and Adrenal glands: neuroblastoma.

[0091] Nucleic acid-based detection techniques and peptide detection techniques that can be used to conduct the above analyses are described below.

### 5.5.1 Detection of the Genes of the Current Invention and Their Respective Transcripts

[0092] Mutations within the genes of the current invention can be detected by utilizing a number of techniques. Nucleic acid from any nucleated cell can be used as the starting point for such assay techniques, and may be isolated according to standard nucleic acid preparation procedures which are well known to those of skill in the art.

[0093] DNA may be used in hybridization or amplification assays of biological samples to detect abnormalities involving gene structure, including point mutations, insertions, deletions and chromosomal rearrangements. Such assays may include, but are not limited to, Southern analyses, single stranded conformational polymorphism analyses (SSCP), and PCR analyses.

[0094] Such diagnostic methods for the detection of gene-specific mutations can involve for example, contacting and incubating nucleic acids including recombinant DNA molecules, cloned genes or degenerate variants thereof, obtained from a sample, e.g., derived from a patient sample or other appropriate cellular source, with one or more labeled nucleic acid reagents including recombinant DNA molecules, cloned genes or degenerate variants thereof, as described above, under conditions favorable for the specific annealing of these reagents to their complementary sequences within the gene of interest of the current invention. Preferably, the lengths of these nucleic acid reagents are at least 15 to 30 nucleotides. After incubation, all non-annealed nucleic acids are removed from the nucleic acid molecule hybrid. The presence of nucleic acids which have hybridized, if any such molecules exist, is then detected. Using such a detection scheme, the nucleic acid from the cell type or tissue of interest can be immobilized, for example, to a solid support such as a membrane, or a plastic surface such as that on a microtiter plate or polystyrene beads. In this case, after incubation, non-annealed, labeled nucleic acid reagents of the type described above are easily removed. Detection of the remaining, annealed, labeled nucleic acid reagents is accomplished using standard techniques well-known to those in the art. The gene sequences to which the nucleic acid reagents have annealed can be compared to the annealing pattern expected from a normal gene sequence in order to determine whether a gene mutation is present.

[0095] Alternative diagnostic methods for the detection of gene specific nucleic acid molecules, in patient samples or other appropriate cell sources, may involve their amplification, e.g., by PCR (the experimental embodiment set forth in Mullis, K. B., 1987, U.S. Pat. No. 4,683,202), followed by the detection of the amplified molecules using techniques well known to those of skill in the art. The resulting amplified sequences can be compared to those which would be expected if the nucleic acid being amplified contained only normal copies of the respective gene in order to determine whether a gene mutation exists.

[0096] Additionally, well-known genotyping techniques can be performed to identify individuals carrying mutations in any of the genes of the current invention. Such techniques include, for example, the use of restriction fragment length polymorphisms (RFLPs), which involve sequence variations in one of the recognition sites for the specific restriction enzyme used.

[0097] Furthermore, the polynucleotide sequences of the current invention may be mapped to chromosomes and specific regions of chromosomes using well known genetic and/or chromosomal mapping techniques. These techniques include in situ hybridization, linkage analysis against known chromosomal markers, hybridization screening with libraries or flow-sorted chromosomal preparations specific to known chromosomes, and the like. The technique of fluorescent in situ hybridization of chromosome spreads has been described, for example, in Verma et al. (1988) Human Chromosomes: A Manual of Basic Techniques, Pergamon Press, New York. Fluorescent in situ hybridization of chromosomal preparations and other physical chromosome mapping techniques may be correlated with additional genetic map data. Examples of genetic map data can be found, for example, in Genetic Maps: Locus Maps of Complex Genomes, Book 5: Human Maps, O'Brien, editor, Cold Spring Harbor Laboratory Press (1990). Comparisons of physical chromosomal map data may be of particular interest in detecting genetic diseases in carrier states.

[0098] The level of expression of genes can also be assayed by detecting and measuring the transcription of such genes. For example, RNA from a cell type or tissue known, or suspected to express any of the genes of the current invention can be isolated and tested utilizing hybridization or PCR techniques (e.g., northern or RT PCR) such as those described, above. Such analyses may reveal both quantitative and qualitative aspects of the expression pattern of the respective gene, including activation or inactivation of gene expression. In situ hybridization using suitably radioactively or enzymatically labeled forms of the described polynucleotide sequences can also be used to assess expression patterns in vivo.

[0099] Additionally, an oligonucleotide or polynucleotide sequence first disclosed in at least a portion of one or more of the GTS sequences of SEQ ID NOS: 1-1,206 can be used as a hybridization probe in conjunction with a solid support matrix/substrate (resins, beads, membranes, plastics, polymers, metal or metallized substrates, crystalline or polycrystalline substrates, etc.). Of particular note are spatially addressable arrays (i.e., gene chips, microtiter plates, etc.) of oligonucleotides and polynucleotides, or corresponding oligopeptides and polypeptides, wherein at least one of the biopolymers present on the spatially addressable array comprises an oligonucleotide or polynucleotide sequence first disclosed in at least one of the GTS sequences of SEQ ID NOS: 1-1,206, or an amino acid sequence encoded thereby. Methods for attaching biopolymers to, or synthesizing biopolymers on, solid support matrices, and conducting binding studies thereon are disclosed in, inter alia, U.S. Pat. Nos. 5,700,637, 5,556,752, 5,744,305, 4,631,211, 5,445,934, 5,252,743, 4,713,326, 5,424,186, and 4,689,405 the disclosures of which are herein incorporated by reference in their entirety.

[0100] Addressable arrays comprising sequences first disclosed in SEQ ID NOS:1-1,206 can be used to identify and characterize the temporal and tissue specific expression of a gene. These addressable arrays incorporate oligonucleotide sequences of sufficient length to confer the required specificity, yet be within the limitations of the production technology. The length of these probes is within a range of between about 8 to about 2000 nucleotides. Preferably the probes consist of 60 nucleotides and more preferably 25 nucleotides from the sequences first disclosed in SEQ ID NOS:1-1,206.

[0101] For example, a series of the described GTS oligonucleotide sequences, or the complements thereof, can be used in chip format to represent all or a portion of the described GTS sequences. The oligonucleotides, typically between about 16 to about 40 (or any whole number within the stated range) nucleotides in length can partially overlap each other and/or the GTS sequence may be represented using oligonucleotides that do not overlap. Accordingly, the described GTS polynucleotide sequences shall typically comprise at least about two or three distinct oligonucleotide sequences of at least about 8 nucleotides in length that are each first disclosed in the described Sequence Listing. Such oligonucleotide sequences can begin at any nucleotide present within a sequence in the Sequence Listing and proceed in either a sense (5′-to-3′) orientation vis-a-vis the described sequence or in an antisense orientation.

[0102] Microarray-based analysis allows the discovery of broad patterns of genetic activity, providing new understanding of gene functions and generating novel and unexpected insight into transcriptional processes and biological mechanisms. The use of addressable arrays comprising sequences first disclosed in SEQ ID NOS:1-1,206 provides detailed information about transcriptional changes involved in a specific pathway, potentially leading to the identification of novel components or gene functions that manifest themselves as novel phenotypes.

[0103] Probes consisting of sequences first disclosed in SEQ ID NOS:1-1,206 can also be used in the identification, selection and validation of novel molecular targets for drug discovery. The use of these unique sequences permits the direct confirmation of drug targets and recognition of drug dependent changes in gene expression that are modulated through pathways distinct from the drugs intended target. These unique sequences therefore also have utility in defining and monitoring both drug action and toxicity.

[0104] As an example of utility, the sequences first disclosed in SEQ ID NOS:1-1,206 can be utilized in microarrays or other assay formats, to screen collections of genetic material from patients who have a particular medical condition. These investigations can also be carried out using the sequences first disclosed in SEQ ID NOS:1-1,206 in silico and by comparing previously collected genetic databases and the disclosed sequences using computer software known to those in the art.

[0105] Thus the sequences first disclosed in SEQ ID NOS:1-1,206 can be used to identify mutations associated with a particular disease and also as a diagnostic or prognostic assay.

[0106] Although the presently described GTSs have been specifically described using nucleotide sequence, it should be appreciated that each of the GTSs can uniquely be described using any of a wide variety of additional structural attributes, or combinations thereof. For example, a given GTS can be described by the net composition of the nucleotides present within a given region of the GTS in conjunction with the presence of one or more specific oligonucleotide sequence(s) first disclosed in the GTS. Alternatively, a restriction map specifying the relative positions of restriction endonuclease digestion sites, or various palindromic or other specific oligonucleotide sequences can be used to structurally describe a given GTS. Such restriction maps, which are typically generated by widely available computer programs (e.g., the University of Wisconsin GCG sequence analysis package, SEQUENCHER 3.0, Gene Codes Corp., Ann Arbor, Mich., etc.), can optionally be used in conjunction with one or more discrete nucleotide sequence(s) present in the GTS that can be described by the relative position of the sequence relative to one or more additional sequence(s) or one or more restriction sites present in the GTS.

### 5.5.2 Detection of the Gene Products of the Current Invention

[0107] Antibodies directed against wild type or mutant gene products of the current invention or conserved variants or peptide fragments thereof, which are discussed above in Section 5.4 may also be used as diagnostics and prognostics for disorders affecting development and cellular differentiation, as described herein. Such diagnostic methods, may be used to detect abnormalities in the level of gene expression, or abnormalities in the structure and/or temporal, tissue, cellular, or subcellular location of the respective gene product, and may be performed in vivo or in vitro, such as, for example, on biopsy tissue.

[0108] The tissue or cell type to be analyzed will generally include those which are known, or suspected, to contain cells that express the respective gene. The protein isolation methods employed herein may, for example, be such as those described in Harlow and Lane (Harlow, E. and Lane, D., 1988, “Antibodies: A Laboratory Manual”, Cold Spring Harbor Laboratory Press, Cold Spring Harbor, N.Y.), which is incorporated herein by reference in its entirety. The isolated cells can be derived from cell culture or from a patient. The analysis of cells taken from culture may be a necessary step in the assessment of cells that could be used as part of a cell-based gene therapy technique or, alternatively, to test the effect of compounds on the expression of the respective gene.

[0109] For example, antibodies, or fragments of antibodies, such as those described above in Section 5.4 are also useful in the present invention to quantitatively or qualitatively detect the presence of gene products of the current invention or conserved variants or peptide fragments thereof. This can be accomplished, for example, by immunofluorescence techniques employing a fluorescently labeled antibody (see below, this Section) coupled with light microscopic, flow cytometric, or fluorimetric detection.

[0110] The antibodies (or fragments thereof) or fusion or conjugated proteins useful in the present invention may, additionally, be employed histologically, as in immunofluorescence, immunoelectron microscopy or non-immuno assays, for in situ detection of gene products of the current invention or conserved variants or peptide fragments thereof, or for catalytic subunit binding (in the case of labeled catalytic subunit fusion protein).

[0111] In situ detection may be accomplished by removing a histological specimen from a patient, and applying thereto a labeled antibody or fusion protein of the present invention. The antibody (or fragment) or fusion protein is preferably applied by overlaying the labeled antibody (or fragment) onto a biological sample. Through the use of such a procedure, it is possible to determine not only the presence of the gene product of the current invention, or conserved variants or peptide fragments, but also its distribution in the examined tissue. Using the present invention, those of ordinary skill will readily perceive that any of a wide variety of histological methods (such as staining procedures) can be modified in order to achieve such in situ detection.

[0112] Immunoassays and non-immunoassays for gene products of the current invention or conserved variants or peptide fragments thereof will typically comprise incubating a sample, such as a biological fluid, a tissue extract, freshly harvested cells, or lysates of cells which have been incubated in cell culture, in the presence of a detectably labeled antibody capable of identifying the respective gene products of interest or conserved variants or peptide fragments thereof, and detecting the bound antibody by any of a number of techniques well-known in the art.

[0113] The biological sample may be brought in contact with and immobilized onto a solid phase support or carrier such as nitrocellulose, or other solid support which is capable of immobilizing cells, cell particles or soluble proteins. The support may then be washed with suitable buffers followed by treatment with the detectably labeled antibody specific to the peptide or protein of interest of the current invention or with fusion protein. The solid phase support may then be washed with the buffer a second time to remove unbound antibody or fusion protein. The amount of bound label on solid support may then be detected by conventional means.

[0114] “Solid phase support or carrier” is intended to encompass any support capable of binding an antigen or an antibody. Well-known supports or carriers include glass, polystyrene, polypropylene, polyethylene, dextran, nylon, amylases, natural and modified celluloses, polyacrylamides, gabbros, and magnetite. The nature of the carrier can be either soluble to some extent or insoluble for the purposes of the present invention. The support material may have virtually any possible structural configuration so long as the coupled molecule is capable of binding to an antigen or antibody. Thus, the support configuration may be spherical, as in a bead, or cylindrical, as in the inside surface of a test tube, or the external surface of a rod. Alternatively, the surface may be flat such as a sheet, test strip, etc. Preferred supports include polystyrene beads. Those skilled in the art will know many other suitable carriers for binding antibody or antigen, or will be able to ascertain the same by use of routine experimentation.

[0115] The binding activity of a given lot of antibody or fusion protein may be determined according to well known methods. Those skilled in the art will be able to determine operative and optimal assay conditions for each determination by employing routine experimentation.

[0116] With respect to antibodies, one of the ways in which the antibody can be detectably labeled is by linking the same to an enzyme and use in an enzyme immunoassay (EIA) (Voller, “The Enzyme Linked Immunosorbent Assay (ELISA)”, 1978, Diagnostic Horizons 2:1-7, Microbiological Associates Quarterly Publication, Walkersville, Md.); Voller et al., 1978, J. Clin. Pathol. 31:507-520; Butler, 1981, Meth. Enzymol. 73:482-523; Maggio (ed.), 1980, Enzyme Immunoassay, CRC Press, Boca Raton, Fla., Ishikawa et al., (eds.), 1981, Enzyme Immunoassay, Kgaku Shoin, Tokyo). The enzyme which is bound to the antibody will react with an appropriate substrate, preferably a chromogenic substrate, in such a manner as to produce a chemical moiety which can be detected, for example, by spectrophotometric, fluorimetric or by visual means. Enzymes which can be used to detectably label the antibody include, but are not limited to, malate dehydrogenase, staphylococcal nuclease, delta-5-steroid isomerase, yeast alcohol dehydrogenase, alpha-glycerophosphate, dehydrogenase, triose phosphate isomerase, horseradish peroxidase, alkaline phosphatase, asparaginase, glucose oxidase, beta-galactosidase, ribonuclease, urease, catalase, glucose-6-phosphate dehydrogenase, glucoamylase and acetylcholinesterase. The detection can be accomplished by colorimetric methods which employ a chromogenic substrate for the enzyme. Detection may also be accomplished by visual comparison of the extent of enzymatic reaction of a substrate in comparison with similarly prepared standards.

[0117] Detection may also be accomplished using any of a variety of other immunoassays. For example, by radioactively labeling the antibodies or antibody fragments, it is possible to detect the peptide or protein of interest through the use of a radioimmunoassay (RIA) (see, for example, Weintraub, B., Principles of Radioimmunoassays, Seventh Training Course on Radioligand Assay Techniques, The Endocrine Society, March, 1986, which is incorporated by reference herein). The radioactive isotope can be detected by such means as the use of a gamma counter or a scintillation counter or by autoradiography.

[0118] It is also possible to label the antibody with a fluorescent compound. When the fluorescently labeled antibody is exposed to light of the proper wave length, its presence can then be detected due to fluorescence. Among the most commonly used fluorescent labeling compounds are fluorescein isothiocyanate, rhodamine, phycoerythrin, phycocyanin, allophycocyanin and fluorescamine.

[0119] The antibody can also be detectably labeled using fluorescence emitting metals such as ¹⁵²Eu, or others of the lanthanide series. These metals can be attached to the antibody using such metal chelating groups as diethylenetriaminepentaacetic acid (DTPA) or ethylenediaminetetraacetic acid (EDTA).

[0120] The antibody also can be detectably labeled by coupling it to a chemiluminescent compound. The presence of the chemiluminescent-tagged antibody is then determined by detecting the presence of luminescence that arises during the course of a chemical reaction. Examples of particularly useful chemiluminescent labeling compounds are luminol, isoluminol, theromatic acridinium ester, imidazole, acridinium salt and oxalate ester.

[0121] Likewise, a bioluminescent compound may be used to label the antibody of the present invention. Bioluminescence is a type of chemiluminescence found in biological systems in, which a catalytic protein increases the efficiency of the chemiluminescent reaction. The presence of a bioluminescent protein is determined by detecting the presence of luminescence. Important bioluminescent compounds for purposes of labeling are luciferin, luciferase and aequorin.

[0122] An additional use of a peptide or polypeptide encoded by an oligonucleotide or polynucleotide sequence first disclosed in at least one of the GTS sequences of SEQ ID NOS: 1-1,206 involves incorporating the sequence into a phage display, or other peptide library/binding, system that can be used to screen for proteins, or other ligands, that are capable of binding to an amino acid sequence encoded by an oligonucleotide or polynucleotide sequence first disclosed in at least one of the GTS sequences of SEQ ID NOS: 1-1,206 (see U.S. Pat. Nos. 5,270,170, and 5,432,018, herein incorporated by reference in their entirety). Moreover, peptide arrays comprising a novel amino acid sequence corresponding to a portion of at least one of the polynucleotide sequences first disclosed in SEQ ID NOS: 1-1,206 can be generated and screened essentially as described in U.S. Pat. Nos. 5,143,854, 5,405,783, and 5,252,743, the complete disclosures of which are herein incorporated by references.

[0123] Additionally, the presently described GTSs, or primers derived therefrom, can be used to screen spatially addressable arrays, or pools therefrom, of clones present in a full-length human cDNA library. The 96 well microtiter plate format is especially well suited to the screening, by PCR for example, of pooled subfractions of cDNA clones.

### 5.6 Screening Assays for Compounds that Modulate the Expresstion or Activity of Peptides Proteins of the Current Invention

[0124] The following assays are designed to identify compounds that interact with (e.g., bind to) peptides and proteins at least partially encoded by one of SEQ ID NOS: 1-1,206 (i.e. peptides or proteins of the current invention) compounds that interact with (e.g., bind to) intracellular proteins that interact with peptides and proteins of the current invention, compounds that interfere with the interaction of peptides and proteins of the current invention with each other and with other intracellular proteins involved in developmental and cell differentiation processes, and to compounds which modulate the activity of genes of the current invention (i.e., modulate the level of expression of genes of the current invention) or modulate the level of gene products of the current invention. Assays may additionally be utilized which identify compounds which bind to gene regulatory sequences (e.g., promoter sequences) and which may modulate the expression of genes of the current invention. See e.g., Platt, K. A., 1994, J. Biol. Chem. 269:28558-28562, which is incorporated herein by reference in its entirety.

[0125] Compounds that can be screened in accordance with the invention include, but are not limited to, peptides, antibodies and fragments thereof, prostaglandins, lipids and other organic compounds (e.g., terpines, peptidomimetics) that bind to the peptide or protein of interest of the current invention and either mimic the activity triggered by the natural ligand (i.e., agonists) or inhibit the activity triggered by the natural ligand (i.e., antagonists); as well as peptides, antibodies or fragments thereof, and other organic compounds that mimic the peptide or protein of interest of the current invention (or a portion thereof) and bind to and “neutralize” natural ligand.

[0126] Such compounds may include, but are not limited to, peptides such as, for example, soluble peptides, including but not limited to members of random peptide libraries (see, e.g., Lam, K. S. et al., 1991, Nature 354:82-84; Houghten, R. et al., 1991, Nature 354:84-86), and combinatorial chemistry-derived molecular library peptides made of D- and/or L-configuration amino acids, phosphopeptides (including, but not limited to members of random or partially degenerate, directed phosphopeptide libraries; see, e.g., Songyang, Z. et al., 1993, Cell 72:767-778); antibodies (including, but not limited to, polyclonal, monoclonal, humanized, anti-idiotypic, chimeric or single chain antibodies, and Fab, F(ab′)₂ and Fab expression library fragments, and epitope-binding fragments thereof); and small organic or inorganic molecules.

[0127] Other compounds that can be screened in accordance with the invention include, but are not limited to, small organic molecules that are able to gain entry into an appropriate cell (e.g., in ES cells) and affect the expression of a gene of the current invention or some other gene involved in development and cell differentiation (e.g., by interacting with the regulatory region or transcription factors involved in gene expression); or such compounds that affect the activity of the peptide or protein of interest of the current invention, e.g., by inhibiting or enhancing the binding of such peptide or protein to another cellular peptide or protein, or other factor, necessary for catalysis, signal transduction, or the like, that is involved in developmental or cell differentiation processes.

[0128] Computer modeling and searching technologies permit the identification of compounds, or the improvement of already identified compounds, that can modulate the expression or activity of peptides or proteins of interest of the current invention. Having identified such a compound or composition, the active sites or regions are identified. Such active sites might typically be the binding partner sites, such as, for example, the interaction domains of the peptides and proteins of the current invention with their respective binding partners. The active site can be identified using methods known in the art including, for example, from study of the amino acid sequences of peptides, from the nucleotide sequences of nucleic acids, or from study of complexes of the relevant compound or composition with its natural ligand. In the latter case, chemical or X-ray crystallographic methods can be used to find the active site by finding where on the factor the complexed ligand is found.

[0129] Next, the three dimensional geometric structure of the active site is determined. This can be done by known methods, including X-ray crystallography, which can determine a complete molecular structure. On the other hand, solid or liquid phase NMR can be used to determine certain intra-molecular distances. Any other experimental method of structure determination can be used to obtain partial or complete geometric structures. The geometric structures may be measured with a complexed ligand, natural or artificial, which may increase the accuracy of the active site structure determined.

[0130] If an incomplete or insufficiently accurate structure is determined, the methods of computer based numerical modeling can be used to complete the structure or improve its accuracy. Any recognized modeling method may be used, including parameterized models specific to particular biopolymers such as proteins or nucleic acids, molecular dynamics models based on computing molecular motions, statistical mechanics models based on thermal ensembles, or combined models. For most types of models, standard molecular force fields, representing the forces between constituent atoms and groups, are necessary, and can be selected from force fields known in physical chemistry. The incomplete or less accurate experimental structures can serve as constraints on the complete and more accurate structures computed by these modeling methods.

[0131] Finally, having determined the structure of the active site, either experimentally, by modeling, or by a combination, candidate modulating compounds can be identified by searching databases containing compounds along with information on their molecular structure. Such a search seeks compounds having structures that match the determined active site structure and that interact with the groups defining the active site. Such a search can be manual, but is preferably computer assisted. These compounds found from this search are potential modulating compounds of the peptides and proteins of interest of the current invention.

[0132] Alternatively, these methods can be used to identify improved modulating compounds from an already known modulating compound or ligand. The composition of the known compound can be modified and the structural effects of modification can be determined using the experimental and computer modeling methods described above applied to the new composition. The altered structure is then compared to the active site structure of the compound to determine if an improved fit or interaction results. In this manner systematic variations in composition, such as by varying side groups, can be quickly evaluated to obtain modified modulating compounds or ligands of improved specificity or activity.

[0133] Further experimental and computer modeling methods useful to identify modulating compounds based upon identification of the active sites of peptides and proteins of interest of the current invention, and related factors involved in development, cellular differentiation, and other cellular processes will be apparent to those of skill in the art.

[0134] Examples of molecular modeling systems are the CHARM and QUANTA programs (Polygon Corporation, Waltham, Mass.). CHARM performs the energy minimization and molecular dynamics functions. QUANTA performs the construction, graphic modeling and analysis of molecular structure. QUANTA allows interactive construction, modification, visualization, and analysis of the behavior of molecules with each other.

[0135] A number of articles review computer modeling of drugs interactive with specific proteins, such as Rotivinen et al., 1988, Acta Pharmaceutical Fennica 97:159-166; Ripka, New Scientist 54-57 (Jun. 16, 1988); McKinaly and Rossmann, 1989, Annu. Rev. Pharmacol. Toxicol. 29:111-122; Perry and Davies, OSAR: Quantitative Structure-Activity Relationships in Drug Design pp. 189-193 (Alan R. Liss, Inc. 1989); Lewis and Dean, 1989, Proc. R. Soc. Lond. 236:125-140 and 141-162; and, with respect to a model receptor for nucleic acid components, Askew et al., 1989, J. Am. Chem. Soc. 111:1082-1090. Other computer programs that screen and graphically depict chemicals are available from companies such as BioDesign, Inc. (Pasadena, Calif.), Allelix, Inc. (Mississauga, Ontario, Canada), and Hypercube, Inc. (Cambridge, Ontario). Although these are primarily designed for application to drugs specific to particular proteins, they can be adapted to the design of drugs specific to regions of DNA or RNA, once that region is identified.

[0136] Although described above with reference to the design and generation of compounds which could alter binding, one could also screen libraries of known compounds, including natural products or synthetic chemicals, and biologically active materials, including proteins, for compounds which are inhibitors or activators.

[0137] Compounds identified via assays such as those described herein may be useful, for example, in elaborating the biological function of the gene products of interest of the current invention, and for ameliorating disorders affecting development and cell differentiation. Assays for testing the effectiveness of compounds, identified by, for example, techniques such as those described below.

### 5.6.1 In Vitro Screening Assays for Compounds that Bind to Peptides and Proteins of the Current Invention

[0138] In vitro systems may be designed to identify compounds capable of interacting with (e.g., binding to) peptides and proteins of interest of the current invention, fragments thereof, and variants thereof. The identified compounds can be useful, for example, in modulating the activity of wild type and/or mutant gene products of the current invention; may be utilized in screens for identifying compounds that disrupt normal interactions of the peptides and proteins of the current invention with other factors, like, for example, other peptides and proteins; or may in themselves disrupt such interactions.

[0139] The principle of the assays used to identify compounds that bind to the peptides and proteins of the current invention involves preparing a reaction mixture of the peptides and proteins of interest that are disclosed by the current invention and a test compound under conditions and for a time sufficient to allow the two components to interact and bind, thus forming a complex that can be removed from and/or detected in the reaction mixture. The peptides and proteins of the current invention that are used can vary depending upon the goal of the screening assay. For example, where agonists of the natural ligand are sought, the full length peptide or protein of interest, or a fusion protein containing the subunit of interest fused to a protein or polypeptide that affords advantages in the assay system (e.g., labeling, isolation of the resulting complex, etc.) can be utilized.

[0140] The screening assays can be conducted in a variety of ways. For example, one method of conducting such an assay involves anchoring the peptide or protein of interest of the current invention, or a fusion protein thereof, or the test substance onto a solid phase and detecting peptide or protein of interest/test compound complexes anchored on the solid phase at the end of the reaction. In one embodiment of such a method, the peptide or protein of interest may be anchored onto a solid surface, and the test compound, which is not anchored, may be labeled, either directly or indirectly. In another embodiment of the method, a peptide or protein of interest of the current invention anchored on the solid phase is complexed with a natural ligand of such peptide or protein of interest. Then, a test compound could be assayed for its ability to disrupt the association of the complex.

[0141] In practice, microtiter plates may conveniently be utilized as the solid phase. The anchored component may be immobilized by non-covalent or covalent attachments. Non-covalent attachment may be accomplished by simply coating the solid surface with a solution of the protein and drying. Alternatively, an immobilized antibody, preferably a monoclonal antibody, specific for the peptide or protein to be immobilized may be used to anchor the peptide or protein to the solid surface. The surfaces may be prepared in advance and stored.

[0142] In order to conduct the assay, the nonimmobilized component is added to the coated surface containing the anchored component. After the reaction is complete, unreacted components are removed (e.g., by washing) under conditions such that any complexes formed will remain immobilized on the solid surface. The detection of complexes anchored on the solid surface can be accomplished in a number of ways. Where the previously nonimmobilized component is pre-labeled, the detection of label immobilized on the surface indicates that complexes were formed. Where the previously nonimmobilized component is not pre-labeled, an indirect label can be used to detect complexes anchored on the surface; e.g., using a labeled antibody specific for the previously nonimmobilized component (the antibody, in turn, may be directly labeled or indirectly labeled with a labeled anti-Ig antibody).

[0143] Alternatively, a reaction can be conducted in a liquid phase, the reaction products separated from unreacted components, and complexes detected; e.g., using an immobilized antibody specific for one component of complexes formed, like, for example, the peptide or protein of interest of the current invention or the test compound to anchor any complexes formed in solution, and a labeled antibody specific for the other component of the possible complex to detect anchored complexes.

### 5.6.2 Assays for Intracellular Proteins that Interact with the Peptides and Proteins of the Current Invention

[0144] Any method suitable for detecting protein-protein interactions can be employed for identifying intracellular peptides and proteins that interact with peptides and proteins of the current invention. Among the traditional methods which may be employed are co-immunoprecipitation, crosslinking and co-purification through gradients or chromatographic columns of cell lysates or proteins obtained from cell lysates and the peptides and proteins of the current invention to identify proteins in the lysate that interact with those peptides and proteins of the current invention. For these assays, the peptides and proteins of the current invention may be used in full length, or in truncated or modified forms or as fusion-proteins. Similarly, the component may be a complex of two or more of the peptides and proteins of the current invention. Once isolated, such an intracellular protein can be identified and can, in turn, be used, in conjunction with standard techniques, to identify proteins with which it interacts. For example, at least a portion of the amino acid sequence of an intracellular protein which interacts with a peptide or protein of the current invention, can be ascertained using techniques well known to those of skill in the art, such as via the Edman degradation technique. (See, e.g., Creighton, 1983, “Proteins: Structures and Molecular Principles”, W. H. Freeman & Co., N.Y., pp.34-49). The amino acid sequence obtained may be used as a guide for the generation of oligonucleotide mixtures that can be used to screen for gene sequences encoding such intracellular proteins. Screening may be accomplished, for example, by standard hybridization or PCR techniques. Techniques for the generation of oligonucleotide mixtures and the screening are well-known. (See, e.g., Ausubel, supra., and PCR Protocols: A Guide to Methods and Applications, 1990, Innis, M. et al., eds. Academic Press, Inc., New York).

[0145] Additionally, methods may be employed which result in the simultaneous identification of genes which encode the intracellular proteins interacting with peptides and proteins of the current invention. These methods include, for example, probing expression libraries, in a manner similar to the well known technique of antibody probing of ëgt11 libraries, using a labeled form of a peptide or protein of the current invention, or a fusion protein, e.g., a peptide or protein at least partially encoded by an GTS of the current invention fused to a marker (e.g., an enzyme, fluor, luminescent protein, or dye), or an Ig-Fc domain.

[0146] One method that detects protein interactions in vivo, the two-hybrid system, is described in detail for illustration only and not by way of limitation. One version of this system has been described (Chien et al., 1991, Proc. Natl. Acad. Sci. USA, 88:9578-9582) and is commercially available from Clontech (Palo Alto, Calif.).

[0147] Briefly, utilizing such a system, plasmids are constructed that encode two hybrid proteins: one plasmid consists of nucleotides encoding the DNA-binding domain of a transcription activator protein fused to a nucleotide sequence of the current invention encoding a peptide or protein of the current invention, a modified or truncated form or a fusion protein, and the other plasmid consists of nucleotides encoding the transcription activator protein's activation domain fused to a cDNA encoding an unknown protein which has been recombined into this plasmid as part of a cDNA library. The DNA-binding domain fusion plasmid and the cDNA library are transformed into a strain of the yeast Saccharomyces cerevisiae that contains a reporter gene (e.g., HBS or lacZ) whose regulatory region contains the transcription activator's binding site. Either hybrid protein alone cannot activate transcription of the reporter gene; the DNA-binding domain hybrid cannot because it does not provide activation function, and the activation domain hybrid cannot because it cannot localize to the activator's binding sites. Interaction of the two hybrid proteins reconstitutes the functional activator protein and results in expression of the reporter gene, which is detected by an assay for the reporter gene product.

[0148] The two-hybrid system or related methodology may be used to screen activation domain libraries for proteins that interact with the “bait” gene product. By way of example, and not by way of limitation, a peptide or protein of the current invention may be used as the bait gene product. Total genomic or cDNA sequences are fused to the DNA encoding an activation domain. This library and a plasmid encoding a hybrid of a bait gene product of the current invention fused to the DNA-binding domain are cotransformed into a yeast reporter strain, and the resulting transformants are screened for those that express the reporter gene. For example, and not by way of limitation, a bait gene sequence of the current invention can be cloned into a vector such that it is translationally fused to the DNA encoding the DNA-binding domain of the GAL4 protein. These colonies are purified and the library plasmids responsible for reporter gene expression are isolated. DNA sequencing is then used to identify the proteins encoded by the library plasmids.

[0149] A cDNA library of the cell line from which proteins that interact with bait gene product of the current invention are to be detected can be made using methods routinely practiced in the art. According to the particular system described herein, for example, the cDNA fragments can be inserted into a vector such that they are translationally fused to the transcriptional activation domain of GAL4. This library can be co-transfected along with the bait gene-GAL4 fusion plasmid into a yeast strain which contains a lacZ gene driven by a promoter which contains GAL4 activation sequence. A cDNA encoded protein, fused to GAL4 transcriptional activation domain, that interacts with bait gene product will reconstitute an active GAL4 protein and thereby drive expression of the HIS3 gene. Colonies which express HIS3 can be detected by their growth on petri dishes containing semi-solid agar based media lacking histidine. The cDNA can then be purified from these strains, and used to produce and isolate the bait gene-interacting protein using techniques routinely practiced in the art.

### 5.6.3 Assays for Compounds that Interfere with Interactions of the Peptides and Proteins of the Current Invention with Intracellular Macromolecules

[0150] The macromolecules that interact with the peptides and proteins of the current invention are referred to, for purposes of this discussion, as “binding partners”. These binding partners are likely to be involved in catalytic reactions or signal transduction pathways, and therefore, in the role of the peptides and proteins of the current invention in development and cell differentiation. It is also desirable to identify compounds that interfere with or disrupt the interaction of such binding partners with the peptides and proteins of the current invention which may be useful in regulating the activity of the peptides and proteins of the current invention and thus control development and cell differentiation disorders associated with the activity of the peptides and proteins of the current invention.

[0151] The basic principle of the assay systems used to identify compounds that interfere with the interaction between the peptides and proteins of the current invention and its binding partner or partners involves preparing a reaction mixture containing the peptides or proteins of the current invention of interest, modified or truncated version thereof, or fusion proteins thereof as described above, and the binding partner under conditions and for a time sufficient to allow the two to interact and bind, thus forming a complex. In order to test a compound for inhibitory activity, the reaction mixture is prepared in the presence and absence of the test compound. The test compound may be initially included in the reaction mixture, or may be added at a time subsequent to the addition of the peptide or protein of the current invention and its binding partner. Control reaction mixtures are incubated without the test compound or with a placebo. The formation of any complexes between the peptide or protein of the current invention and the binding partner is then detected. The formation of a complex in the control reaction, but not in the reaction mixture containing the test compound, indicates that the compound interferes with the interaction of the peptide or protein at least partially encoded by an GTS of the present invention and the interactive binding partner. Additionally, complex formation within reaction mixtures containing the test compound and normal peptide or protein of the current invention may also be compared to complex formation within reaction mixtures containing the test compound and a mutant peptide or protein of the current invention. This comparison may be important in those cases where it is desirable to identify compounds that disrupt interactions of mutant but not normal forms of a peptide or protein of the current invention.

[0152] The assay for compounds that interfere with the interaction of a peptide or protein of the current invention and binding partners can be conducted in a heterogeneous or homogeneous format. Heterogeneous assays involve anchoring either the peptide or protein of the current invention or the binding partner onto a solid phase and detecting complexes anchored on the solid phase at the end of the reaction. In homogeneous assays, the entire reaction is carried out in a liquid phase. In either approach, the order of addition of reactants can be varied to obtain different information about the compounds being tested. For example, test compounds that interfere with the interaction by competition can be identified by conducting the reaction in the presence of the test substance; i.e., by adding the test substance to the reaction mixture prior to or simultaneously with the peptide or protein of the current invention and interactive binding partner. Alternatively, test compounds that disrupt preformed complexes, e.g. compounds with higher binding constants that displace one of the components from the complex, can be tested by adding the test compound to the reaction mixture after complexes have been formed. The various formats are described briefly below.

[0153] In a heterogeneous assay system, either the peptide or protein of the current invention or the interactive binding partner, is anchored onto a solid surface, while the non-anchored species is labeled, either directly or indirectly. In practice, microtiter plates are conveniently utilized. The anchored species may be immobilized by non-covalent or covalent attachments. Non-covalent attachment may be accomplished simply by coating the solid surface with a solution of the peptide or protein of the current invention or binding partner and drying. Alternatively, an immobilized antibody specific for the species to be anchored may be used to anchor the species to the solid surface. The surfaces may be prepared in advance and stored.

[0154] In order to conduct the assay, the partner of the immobilized species is exposed to the coated surface with or without the test compound. After the reaction is complete, unreacted components are removed (e.g., by washing) and any complexes formed will remain immobilized on the solid surface. The detection of complexes anchored on the solid surface can be accomplished in a number of ways. Where the non-immobilized species is pre-labeled, the detection of label immobilized on the surface indicates that complexes were formed. Where the non-immobilized species is not pre-labeled, an indirect label can be used to detect complexes anchored on the surface; e.g., using a labeled antibody specific for the initially non-immobilized species (the antibody, in turn, may be directly labeled or indirectly labeled with a labeled anti-Ig antibody). Depending upon the order of addition of reaction components, test compounds which inhibit complex formation or which disrupt preformed complexes can be detected.

[0155] Alternatively, the reaction can be conducted in a liquid phase in the presence or absence of the test compound, the reaction products separated from unreacted components, and complexes detected; e.g., using an immobilized antibody specific for one of the binding components to anchor any complexes formed in solution, and a labeled antibody specific for the other partner to detect anchored complexes. Again, depending upon the order of addition of reactants to the liquid phase, test compounds which inhibit complex or which disrupt preformed complexes can be identified.

[0156] In an alternate embodiment of the invention, a homogeneous assay can be used. In this approach, a preformed complex of the peptide or protein of the current invention and the interactive binding partner is prepared in which either the peptide or protein of the current invention or its binding partner is labeled, but the signal generated by the label is quenched due to formation of the complex (see, e.g., U.S. Pat. No. 4,109,496 by Rubenstein which utilizes this approach for immunoassays). The addition of a test substance that competes with and displaces one of the species from the preformed complex will result in the generation of a signal above background. In this way, test substances which disrupt peptide or protein of the current invention/intracellular binding partner interaction can be identified.

[0157] In a particular embodiment, a peptide or protein of the current invention can be prepared for immobilization. For example, the peptide or protein of the current invention or a fragment thereof can be fused to a glutathione-S-transferase (GST) gene using a fusion vector, such as pGEX-5X-1, in such a manner that its binding activity is maintained in the resulting fusion protein. The interactive binding partner can be purified and used to raise a monoclonal antibody, using methods routinely practiced in the art and described above. This antibody can be labeled with the radioactive isotope ¹²⁵I, for example, by methods routinely practiced in the art. In a heterogeneous assay, e.g., the GST-peptide or protein of the current invention fusion protein can be anchored to glutathione-agarose beads. The interactive binding partner can then be added in the presence or absence of the test compound in a manner that allows interaction and binding to occur. At the end of the reaction period, unbound material can be washed away, and the labeled monoclonal antibody can be added to the system and allowed to bind to the complexed components. The interaction between the peptide or protein of the current invention and the interactive binding partner can be detected by measuring the amount of radioactivity that remains associated with the glutathione-agarose beads. A successful inhibition of the interaction by the test compound will result in a decrease in measured radioactivity.

[0158] Alternatively, the GST-peptide or protein of the current invention fusion protein and the interactive binding partner can be mixed together in liquid in the absence of the solid glutathione-agarose beads. The test compound can be added either during or after the species are allowed to interact. This mixture can then be added to the glutathione-agarose beads and unbound material is washed away. Again the extent of inhibition of the peptide or protein of the current invention/binding partner interaction can be detected by adding the labeled antibody and measuring the radioactivity associated with the beads.

[0159] In another embodiment of the invention, these same techniques can be employed using peptide fragments that correspond to the binding domains of a peptide or protein of the current invention and/or the interactive or binding partner (in cases where the binding partner is a protein), in place of one or both of the full length proteins. Any number of methods routinely practiced in the art can be used to identify and isolate the binding sites. These methods include, but are not limited to, mutagenesis of the gene encoding one of the proteins and screening for disruption of binding in a co-immunoprecipitation assay. Compensating mutations in the gene encoding the second species in the complex can then be selected. Sequence analysis of the genes encoding the respective proteins will reveal the mutations that correspond to the region of the protein involved in interactive binding. Alternatively, one protein can be anchored to a solid surface using methods described above, and allowed to interact with and bind to its labeled binding partner, which has been treated with a proteolytic enzyme, such as trypsin. After washing, a short, labeled peptide comprising the binding domain may remain associated with the solid material, which can be isolated and identified by amino acid sequencing. Also, once the gene coding for the intracellular binding partner is obtained, short gene segments can be engineered to express peptide fragments of the protein, which can then be tested for binding activity and purified or synthesized.

[0160] For example, and not by way of limitation, a peptide or protein of the current invention can be anchored to a solid material as described, above, by making a GST-peptide or protein of the current invention fusion protein and allowing it to bind to glutathione agarose beads. The interactive binding partner can be labeled with a radioactive isotope, such as ³⁵S, and cleaved with a proteolytic enzyme such as trypsin. Cleavage products can then be added to the anchored GST-peptide or protein of the current invention fusion protein and allowed to bind. After washing away unbound peptides, labeled bound material, representing the intracellular binding partner binding domain, can be eluted, purified, and analyzed for amino acid sequence by well-known methods. Peptides so identified can be produced synthetically or fused to appropriate facilitative proteins using recombinant DNA technology.

### 5.6.4 Assays for Identification of Compounds that Ameliorate Disorder Affecting Development and Cell Differentation

[0161] Compounds, including but not limited to binding compounds identified via assay techniques such as those described above, can be tested for the ability to ameliorate development and cell differentiation disorder symptoms. The assays described above can identify compounds which affect the activity of peptides and proteins of the current invention (e.g., compounds that bind to the peptides and proteins of the current invention, inhibit binding of their natural ligands, and compounds that bind to a natural ligand of the peptides and proteins of the current invention and neutralize the ligand activity); or compounds that affect the activity of genes encoding peptides and proteins of the current invention (by affecting the expression of those genes, including molecules, e.g., proteins or small organic molecules, that affect or interfere with splicing events so that expression of the genes of interest can be modulated). However, it should be noted that the assays described herein can also identify compounds that modulate signal transduction or catalytic events that the peptides and proteins of the current invention are involved in. The identification and use of such compounds which affect a step in, for example, signal transduction pathways or catalytic events in which any of the peptides and proteins of the current invention are involved in, may modulate the effect of the peptides and proteins of the current invention on developmental or cell differentiation disorders. Such identification and use of such compounds are within the scope of the invention. Such compounds can be used as part of a therapeutic method for the treatment of developmental and cell differentiation disorders.

[0162] The invention encompasses cell-based and animal model-based assays for the identification of compounds exhibiting such an ability to ameliorate developmental and cell differentiation disorder symptoms. Such cell-based assay systems can also be used as the standard to assay for purity and potency of the natural ligand, catalytic subunit, including recombinantly or synthetically produced catalytic subunit and catalytic subunit mutants.

[0163] Cell-based systems can be used to identify compounds which may act to ameliorate developmental or cell differentiation disorder symptoms. Such cell systems can include, for example, recombinant or non-recombinant cells, such as cell lines, which express the gene encoding the peptide or protein of interest of the current invention. For example ES cells, or cell lines derived from ES cells can be used. In addition, expression host cells (e.g., COS cells, CHO cells, fibroblasts, Sf9 cells) genetically engineered to express a functional peptide or protein of the current invention in addition to factors necessary for the peptide or protein of the current invention to fulfil its physiological role of, for example, signal transduction or catalysis, can be used as an end point in the assay.

[0164] In utilizing such cell systems, cells may be exposed to a compound suspected of exhibiting an ability to ameliorate developmental or cell differentiation disorder symptoms, at a sufficient concentration and for a time sufficient to elicit such an amelioration of such disorder symptoms in the exposed cells. After exposure, the cells can be assayed to measure alterations in the expression of the gene encoding the peptide or protein of interest of the current invention, e.g., by assaying cell lysates for the appropriate mRNA transcripts (e.g., by Northern analysis) or for expression of the peptide or protein of interest of the current invention in the cell; compounds which regulate or modulate expression of the gene encoding the peptide or protein of interest of the current invention are valuable candidates as therapeutics. Alternatively, the cells are examined to determine whether one or more developmental or cell differentiation disorder-like cellular phenotypes has been altered to resemble a more normal or more wild type phenotype, or a phenotype more likely to produce a lower incidence or severity of disorder symptoms. Still further, the expression and/or activity of components of pathways or functionally or physiologically connected peptides or proteins of which the peptide or protein of interest of the current invention is a part, can be assayed.

[0165] For example, after exposure of the cells, cell lysates can be assayed for the presence of increased levels of the test compound as compared to lysates derived from unexposed control cells. The ability of a test compound to inhibit production of the assay compound such systems indicates that the test compound inhibits signal transduction initiated by the peptide or protein of interest of the current invention. Finally, a change in cellular morphology of intact cells may be assayed using techniques well known to those of skill in the art.

[0166] In addition, animal-based development or cell differentiation disorder systems, which may include, for example, mice, may be used to identify compounds capable of ameliorating development or cell differentiation disorder-like symptoms. Such animal models may be used as test systems for the identification of drugs, pharmaceuticals, therapies and interventions which may be effective in treating such disorders. For example, animal models may be exposed to a compound, suspected of exhibiting an ability to ameliorate development or cell differentiation disorder symptoms, at a sufficient concentration and for a time sufficient to elicit such an amelioration of development and/or cell differentiation disorder symptoms in the exposed animals. The response of the animals to the exposure may be monitored by assessing the reversal of disorders associated with development and/or cell differentiation disorders. With regard to intervention, any treatments which reverse any aspect of development or cell differentiation disorder-like symptoms should be considered as candidates for human development and/or cell differentiation disorder therapeutic intervention. Dosages of test agents may be determined by deriving dose-response curves, as discussed below.

### 5.7 THE Treatment of Disorders Associated with Stimulation of Peptides and Proteins of the Current Invention

[0167] The invention also encompasses methods and compositions for modifying development and cell differentiation and treating development and cell differentiation disorders. For example, one may decrease the level of expression of one or more genes of the current invention, and/or downregulate activity of one or more of the peptides or proteins of interest of the current invention. Thereby, the response of cells, like, for example, ES cells, to factors which activate the physiological responses that enhance the pathological processes leading to developmental and cell differentiation disorders may be reduced and the symptoms ameliorated. Conversely, the response of cells, like, for example, ES cells, to physiological stimuli involving any of the peptides or proteins of the current invention and necessary for proper developmental and cell differentiation processes may be augmented by increasing the activity of one or several of the peptides or proteins of interest of the current invention. Different approaches are discussed below.

### 5.7.1 Inhibition of Peptides and Proteins of the Current Invention of Reduce Development Cell Differentiation Disorders

[0168] Any method which neutralizes the catalytic or signal transduction activity of peptides and proteins at least partially encoded by the GTSs of the current invention, or which inhibits expression of the genes encoding peptides and proteins (either transcription or translation), can be used to reduce symptoms associated with developmental and cell differentiation disorders.

[0169] In one embodiment, immuno therapy can be designed to reduce the level of endogenous gene expression for the peptides and proteins of the current invention, e.g., using antisense or ribozyme approaches to inhibit or prevent translation of mRNA transcripts; triple helix approaches to inhibit transcription of the genes; or targeted homologous recombination to inactivate or “knock out” the genes or its endogenous promoter.

[0170] Antisense approaches involve the design of oligonucleotides (either DNA or RNA) that are complementary to mRNA specific for peptides and proteins of interest of the current invention. The antisense oligonucleotides will bind to the complementary mRNA transcripts and prevent translation. Absolute complementarity, although preferred, is not required. A sequence “complementary” to a portion of an RNA, as referred to herein, means a sequence having sufficient complementarity to be able to hybridize with the RNA, forming a stable duplex. In the case of double-stranded antisense nucleic acids, a single strand of the normally duplex DNA can thus be tested, or triplex formation can be assayed. The ability to hybridize will depend on both the degree of complementarity and the length of the antisense nucleic acid. Generally, the longer the hybridizing nucleic acid, the more base mismatches with an RNA it may contain and still form a stable duplex (or triplex, as the case may be). One skilled in the art can ascertain a tolerable degree of mismatch by use of standard procedures to determine the melting point of the hybridized complex.

[0171] Oligonucleotides that are complementary to the 5′ end of the message, e.g., the 5′ untranslated sequence up to and including the AUG initiation codon, should work most efficiently at inhibiting translation. However, sequences complementary to the 3′ untranslated sequences of mRNAs have recently shown to be effective at inhibiting translation of mRNAs as well. See generally, Wagner, R., 1994, Nature 372:333-335. Thus, oligonucleotides complementary to either the 5′- or 3′- non-translated, non-coding regions of the mRNAs specific for the peptides and proteins of the current invention could be used in an antisense approach to inhibit translation of those endogenous mRNAs. Oligonucleotides complementary to the 5′ untranslated region of the mRNA should include the complement of the AUG start codon. Antisense oligonucleotides complementary to mRNA coding regions are less efficient inhibitors of translation but could be used in accordance with the invention. Whether designed to hybridize to the 5′-, 3′- or coding region of an mRNA, antisense nucleic acids should be at least six nucleotides in length, and are preferably oligonucleotides ranging from 6 to about 50 nucleotides in length. In specific aspects the oligonucleotide is at least 10 nucleotides, at least 17 nucleotides, at least 25 nucleotides or at least 50 nucleotides.

[0172] Regardless of the choice of target sequence, it is preferred that in vitro studies are first performed to quantitate the ability of the antisense oligonucleotide to inhibit gene expression. It is preferred that these studies utilize controls that distinguish between antisense gene inhibition and nonspecific biological effects of oligonucleotides. It is also preferred that these studies compare levels of the target RNA or protein with that of an internal control RNA or protein. Additionally, it is envisioned that results obtained using the antisense oligonucleotide are compared with those obtained using a control oligonucleotide. It is preferred that the control oligonucleotide is of approximately the same length as the test oligonucleotide and that the nucleotide sequence of the oligonucleotide differs from the antisense sequence no more than is necessary to prevent specific hybridization to the target sequence.

[0173] The oligonucleotides can be DNA or RNA or chimeric mixtures or derivatives or modified versions thereof, single-stranded or double-stranded. The oligonucleotide can be modified at the base moiety, sugar moiety, or phosphate backbone, for example, to improve stability of the molecule, hybridization, etc. The oligonucleotide may include other appended groups such as peptides (e.g., for targeting host cell receptors in vivo), or agents facilitating transport across the cell membrane (see, e.g., Letsinger et al., 1989, Proc. Natl. Acad. Sci. U.S.A. 86:6553-6556; Lemaitre et al., 1987, Proc. Natl. Acad. Sci. 84:648-652; PCT Publication No. WO88/09810, published Dec. 15, 1988), or hybridization-triggered cleavage agents. (See, e.g., Krol et al., 1988, BioTechniques 6:958-976) or intercalating agents. (See, e.g., Zon, 1988, Pharm. Res. 5:539-549). To this end, the oligonucleotide may be conjugated to another molecule, e.g., a peptide, hybridization triggered cross-linking agent, transport agent, hybridization-triggered cleavage agent, etc.

[0174] The antisense oligonucleotide may comprise at least one modified base moiety which is selected from the group including but not limited to 5-fluorouracil, 5-bromouracil, 5-chlorouracil, 5-iodouracil, hypoxanthine, xantine, 4-acetylcytosine, 5-(carboxyhydroxylmethyl) uracil, 5-carboxymethylaminomethyl-2-thiouridine, 5-carboxymethylaminomethyluracil, dihydrouracil, beta-D-galactosylqueosine, inosine, N6-isopentenyladenine, 1-methylguanine, 1-methylinosine, 2,2-dimethylguanine, 2-methyladenine, 2-methylguanine, 3-methylcytosine, 5-methylcytosine, N6-adenine, 7-methylguanine, 5-methylaminomethyluracil, 5-methoxyaminomethyl-2-thiouracil, beta-D-mannosylqueosine, 5′-methoxycarboxymethyluracil, 5-methoxyuracil, 2-methylthio-N6-isopentenyladenine, uracil-5-oxyacetic acid (v), wybutoxosine, pseudouracil, queosine, 2-thiocytosine, 5-methyl-2-thiouracil, 2-thiouracil, 4-thiouracil, 5-methyluracil, uracil-5-oxyacetic acid methylester, uracil-5-oxyacetic acid (v), 5-methyl-2-thiouracil, 3-(3-amino-3-N-2-carboxypropyl) uracil, (acp3)w, and 2,6-diaminopurine.

[0175] The antisense oligonucleotide may also comprise at least one modified sugar moiety selected from the group including but not limited to arabinose, 2-fluoroarabinose, xylulose, and hexose.

[0176] In another embodiment, the antisense oligonucleotide comprises at least one modified phosphate backbone selected from the group consisting of a phosphorothioate, a phosphorodithioate, a phosphoramidothioate, a phosphoramidate, a phosphordiamidate, a methylphosphonate, an alkyl phosphotriester, and a formacetal or analog thereof.

[0177] In yet another embodiment, the antisense oligonucleotide is an alpha-anomeric oligonucleotide. An alpha-anomeric oligonucleotide forms specific double-stranded hybrids with complementary RNA in which, contrary to the usual alpha-units, the strands run parallel to each other (Gautier et al., 1987, Nucl. Acids Res. 15:6625-6641). The oligonucleotide is a 2′-0-methylribonucleotide (Inoue et al., 1987, Nucl. Acids Res. 15:6131-6148), or a chimeric RNA-DNA analogue (Inoue et al., 1987, FEBS Lett. 215:327-330).

[0178] Oligonucleotides of the invention may be synthesized by standard methods known in the art, e.g. by use of an automated DNA synthesizer (such as are commercially available from Biosearch, Applied Biosystems, etc.). As examples, phosphorothioate oligonucleotides may be synthesized by the method of Stein et al., 1988, Nucl. Acids Res. 16:3209. Methylphosphonate oligonucleotides can be prepared by use of controlled pore glass polymer supports (Sarin et al., 1988, Proc. Natl. Acad. Sci. U.S.A. 85:7448-7451).

[0179] While antisense nucleotides complementary to the coding region sequence specific for the peptides and proteins of the current invention could be used, those complementary to the transcribed untranslated region are most preferred.

[0180] The antisense molecules should be delivered to cells which express the peptides and proteins of interest of the current invention in vivo, like, for example, ES cells. A number of methods have been developed for delivering antisense DNA or RNA to cells; e.g., antisense molecules can be injected directly into the tissue or cell derivation site, or modified antisense molecules, designed to target the desired cells (e.g., antisense linked to peptides or antibodies that specifically bind receptors or antigens expressed on the target cell surface) can be administered systemically.

[0181] However, it is often difficult to achieve intracellular concentrations of antisense molecules that are sufficient to suppress translation of endogenous mRNAs. Therefore a preferred approach utilizes a recombinant DNA construct in which the antisense oligonucleotide is placed under the control of a strong pol III or pol II promoter. The use of such a construct to transfect target cells in the patient will result in the transcription of sufficient amounts of single stranded RNAs that will form complementary base pairs with the endogenous transcripts specific for the peptides and proteins of interest of the current invention and thereby prevent translation of the respective mRNAs. For example, a vector can be introduced in vivo such that it is taken up by a cell and directs the transcription of an antisense RNA. Such a vector can remain episomal or become chromosomally integrated, as long as it can be transcribed to produce the desired antisense RNA. Such vectors can be constructed by recombinant DNA technology methods standard in the art. Vectors can be plasmid, viral, or others known in the art, used for replication and expression in mammalian cells. Expression of the sequence encoding the antisense RNA can be by any promoter known in the art to act in mammalian, preferably human cells. Such promoters can be inducible or constitutive. Such promoters include but are not limited to: the SV40 early promoter region (Bernoist and Chambon, 1981, Nature 290:304-310), the promoter contained in the 3′ long terminal repeat of Rous sarcoma virus (Yamamoto et al., 1980, Cell 22:787-797), the herpes thymidine kinase promoter (Wagner et al., 1981, Proc. Natl. Acad. Sci. U.S.A. 78:1441-1445), the regulatory sequences of the metallothionein gene (Brinster et al., 1982, Nature 296:39-42), etc. Any type of plasmid, cosmid, YAC or viral vector can be used to prepare the recombinant DNA construct which can be introduced directly into the tissue or cell derivation site; e.g., the bone marrow. Alternatively, viral vectors can be used which selectively infect the desired tissue or cell type; (e.g., viruses which infect cells of hematopoietic lineage), in which case administration may be accomplished by another route (e.g., systemically).

[0182] Ribozyme molecules designed to catalytically cleave mRNA transcripts specific for the peptides and proteins of interest of the current invention can also be used to prevent translation of the mRNAs of interest and expression of the peptides and proteins encoded by those mRNAs. (See, e.g., PCT International Publication WO90/11364, published Oct. 4, 1990; Sarver et al., 1990, Science 247:1222-1225). While ribozymes that cleave mRNA at site specific recognition sequences can be used to destroy mRNAs, the use of hammerhead ribozymes is preferred. Hammerhead ribozymes cleave mRNAs at locations dictated by flanking regions that form complementary base pairs with the target mRNA. The sole requirement is that the target mRNA have the following sequence of two bases: 5′-UG-3′. The construction and production of hammerhead ribozymes is well known in the art and is described more fully in Haseloff and Gerlach, 1988, Nature, 334:585-591. Preferably the ribozyme is engineered so that the cleavage recognition site is located near the 5′ end of the mRNA of interest; i.e., to increase efficiency and minimize the intracellular accumulation of non-functional mRNA transcripts.

[0183] The ribozymes of the present invention also include RNA endoribonucleases (hereinafter “Cech-type ribozymes”) such as the one which occurs naturally in Tetrahymena Thermophila (known as the IVS, or L-19 IVS RNA) and which has been extensively described by Thomas Cech and collaborators (Zaug et al., 1984, Science, 224:574-578; Zaug and Cech, 1986, Science, 231:470-475; Zaug et al., 1986, Nature, 324:429-433; published International Patent Application No. WO 88/04300 by University Patents Inc.; Been and Cech, 1986, Cell, 47:207-216). The Cech-type ribozymes have an eight base pair active site which hybridizes to a target RNA sequence where after cleavage of the target RNA takes place. The invention encompasses those Cech-type ribozymes which target eight base-pair active site sequences that are present in the mRNAs specific for the peptides and proteins of interest of the current invention.

[0184] As in the antisense approach, the ribozymes can be composed of modified oligonucleotides (e.g. for improved stability, targeting, etc.) and should be delivered to cells which express the peptides and proteins of interest of the current invention in vivo, like, for example, ES cells. A preferred method of delivery involves using a DNA construct “encoding” the ribozyme under the control of a strong constitutive pol III or pol II promoter, so that transfected cells will produce sufficient quantities of the ribozyme to destroy the endogenous messages specific for the peptides and proteins of interest of the current invention and inhibit translation. Because ribozymes unlike antisense molecules, are catalytic, a lower intracellular concentration is required for efficiency.

[0185] Endogenous gene expression can also be reduced by inactivating or “knocking out” the gene of interest specific for a peptide or protein of the current invention or its promoter using targeted homologous recombination. (e.g., see Smithies et al., 1985, Nature 317:230-234; Thomas & Capecchi, 1987, Cell 51:503-512; Thompson et al., 1989 Cell 5:313-321; each of which is incorporated by reference herein in its entirety). For example, a mutant, non-functional peptide or protein of interest of the current invention (or a completely unrelated DNA sequence) flanked by DNA homologous to the endogenous gene encoding said peptide or protein of interest of the current invention (either the coding regions or regulatory regions of the gene) can be used, with or without a selectable marker and/or a negative selectable marker, to transfect cells that express said peptide or protein of interest of the current invention in vivo. Insertion of the DNA construct, via targeted homologous recombination, results in inactivation of the targeted endogenous gene. Such approaches are particularly suited in the agricultural field where modifications to ES cells can be used to generate animal offspring with an inactive copy of a gene encoding a peptide or protein of interest of the current invention (e.g., see Thomas & Capecchi 1987 and Thompson 1989, supra). However this approach can be adapted for use in humans provided the recombinant DNA constructs are directly administered or targeted to the required site in vivo using appropriate viral vectors.

[0186] Alternatively, endogenous expression of a gene of interest can be reduced by targeting deoxyribonucleotide sequences complementary to the regulatory region of said gene (i.e., the promoter and/or enhancers) to form triple helical structures that prevent transcription of the gene of interest in target cells in the body. (See generally, Helene, C. 1991, Anticancer Drug Des., 6(6):569-84; Helene, C. et al., 1992, Ann, N.Y. Acad. Sci., 660:27-36; and Maher, L. J., 1992, Bioassays 14 (12):807-15).

[0187] In yet another embodiment of the invention, the activity of a peptide or protein of interest of the current invention can be reduced using a “dominant negative” approach. A dominant negative approach takes advantage of the interaction of the peptides or proteins of interest with other peptides or proteins to form complexes, the formation of which is a prerequisite for the peptide or protein of interest of the current invention to exert its physiological activity. To this end, constructs which encode a defective form of the peptide or protein of interest of the current invention can be used in gene therapy approaches to diminish the activity of said peptide or protein of interest in appropriate target cells. Alternatively, targeted homologous recombination can be utilized to introduce such deletions or mutations into the subject's endogenous gene encoding the peptide or protein of interest of the current invention in the appropriate tissue. The engineered cells will express non-functional copies of the peptide or protein of interest of the current invention, thereby downregulating its activity in vivo. Such engineered cells should demonstrate a diminished response to physiological stimuli of the activity of the affected peptide or protein of interest of the current invention, resulting in reduction of the development or cell differentiation disorder phenotype.

### 5.7.2 Restoration or Increase in Expression or Activity of a Peptide or Protein of the Current Invention to Promote Development or Cell Differentiation

[0188] With respect to an increase in the level of normal gene expression and/or gene product activity specific for any of the peptides and proteins of interest of the current invention, the respective nucleic acid sequences can be utilized for the treatment of development and cell differentiation disorders. Where the cause of the development or cell differentiation dysfunction is a defective peptide or protein of the current invention, treatment can be administered, for example, in the form of gene delivery or gene therapy. Specifically, one or more copies of a normal gene or a portion of the gene that directs the production of a gene product exhibiting normal function of the appropriate peptide or protein of the current invention, may be inserted into the appropriate cells within a patient or animal subject, optionally using suitable vectors. Recombinant retroviruses have been widely used in gene transfer or gene delivery experiments and even human clinical trials (see generally, Mulligan, R. C., Chapter 8, In: Experimental Manipulation of Gene Expression, Academic Press, pp. 155-173 (1983); Coffin, J., In: RNA Tumor Viruses, Weiss, R. et al. (eds.), Cold Spring Harbor Laboratory, Vol. 2, pp. 36-38 (1985). Other eucaryotic viruses which have been used as vectors to transduce mammalian cells include adenovirus, papilloma virus, herpes virus, adeno-associated virus, rabies virus, and the like (See generally, Sambrook et al., Molecular Cloning, Cold Spring Harbor Laboratory Press, Cold Spring Harbor, N.Y., Vol. 3:16.1-16.89 (1989). Alternatively, cationic or other lipids may be employed to deliver polynucleotides comprising the described GTS sequences to patients. Additionally, naked DNA comprising one or more GTS sequences, optionally modified by the addition of one or more of, in operable combination and orientation, a promoter, an enhancer, a ribosome entry or ribosome binding site, and/or an in-frame translation initiation codon can be employed to deliver GTSs to a patient. Another use of the above constructs includes “naked” DNA vaccines that can be introduced in vivo alone, or in conjunction with excipients, or microcarrier spheres, nanoparticles or other supporting or dosaging compounds or molecules.

[0189] The gene replacement/delivery therapies described above should be capable of delivering gene sequences to the cell types within patients which express the peptide or protein of interest of the current invention. Alternatively, targeted homologous recombination can be utilized to correct the defective endogenous gene in the appropriate cell type. In animals, targeted homologous recombination can be used to correct the defect in ES cells in order to generate offspring with a corrected trait.

[0190] Finally, compounds identified in the assays described above that stimulate, enhance, or modify the activity of the peptides and proteins of the current invention can be used to achieve proper development and cell differentiation. The formulation and mode of administration will depend upon the physico-chemical properties of the compound.

### 5.8 Pharmaceutical Preparations and Methods of Adminstration

[0191] Compounds that are determined to affect gene expression of the peptides and proteins of the current invention, or the interaction of those peptides and proteins with any of their binding partners, can be administered to a patient at therapeutically effective doses to treat or ameliorate development and cell differentiation disorders. A therapeutically effective dose refers to that amount of the compound sufficient to result in any amelioration or retardation of disease symptoms, or development and cell differentiation or proliferation disorders.

### 5.8.1 Effective Dose

[0192] Toxicity and therapeutic efficacy of such compounds can be determined by standard pharmaceutical procedures in cell cultures or experimental animals, e.g., for determining the LD₅₀ (the dose lethal to 50% of the population) and the ED₅₀ (the dose therapeutically effective in 50% of the population). The dose ratio between toxic and therapeutic effects is the therapeutic index and it can be expressed as the ratio LD₅₀/ED₅₀. Compounds which exhibit large therapeutic indices are preferred. While compounds that exhibit toxic side effects may be used, care should be taken to design a delivery system that targets such compounds to the site of affected tissue in order to minimize potential damage to uninfected cells and, thereby, reduce side effects.

[0193] The data obtained from the cell culture assays and animal studies can be used in formulating a range of dosage for use in humans. The dosage of such compounds lies preferably within a range of circulating concentrations that include the ED₅₀ with little or no toxicity. The dosage may vary within this range depending upon the dosage form employed and the route of administration utilized. For any compound used in the method of the invention, the therapeutically effective dose can be estimated initially from cell culture assays. A dose may be formulated in animal models to achieve a circulating plasma concentration range that includes the IC₅₀ (i.e., the concentration of the test compound which achieves a half-maximal inhibition of symptoms) as determined in cell culture. Such information can be used to more accurately determine useful doses in humans. Levels in plasma may be measured, for example, by high performance liquid chromatography.

[0194] When the therapeutic treatment of disease is contemplated, the appropriate dosage may also be determined using animal studies to determine the maximal tolerable dose, or MTD, of a bioactive agent per kilogram weight of the test subject. In general, at least one animal species tested is mammalian. Those skilled in the art regularly extrapolate doses for efficacy and avoiding toxicity to other species, including human. Before human studies of efficacy are undertaken, Phase I clinical studies in normal subjects help establish safe doses.

[0195] Additionally, the bioactive agent may be complexed with a variety of well established compounds or structures that, for instance, enhance the stability of the bioactive agent, or otherwise enhance its pharmacological properties (e.g., increase in vivo half-life, reduce toxicity, etc.).

[0196] The above therapeutic agents will be administered by any number of methods known to those of ordinary skill in the art including, but not limited to, administration by inhalation; by subcutaneous (sub-q), intravenous (I.V.), intraperitoneal (I.P.), intramuscular (I.M.), or intrathecal injection; or as a topically applied agent (transderm, ointments, creams, salves, eye drops, and the like).

### 5.8.2 Formulations and Use

[0197] Pharmaceutical compositions for use in accordance with the present invention may be formulated in conventional manner using one or more physiologically acceptable carriers or excipients.

[0198] Thus, the compounds and their physiologically acceptable salts and solvates may be formulated for administration by inhalation or insufflation (either through the mouth or the nose) or oral, buccal, parenteral or rectal administration.

[0199] For oral administration, the pharmaceutical compositions may take the form of, for example, tablets or capsules prepared by conventional means with pharmaceutically acceptable excipients such as binding agents (e.g., pregelatinised maize starch, polyvinylpyrrolidone or hydroxypropyl methylcellulose); fillers (e.g., lactose, microcrystalline cellulose or calcium hydrogen phosphate); lubricants (e.g., magnesium stearate, talc or silica); disintegrants (e.g., potato starch or sodium starch glycolate); or wetting agents (e.g., sodium lauryl sulphate). The tablets may be coated by methods well known in the art. Liquid preparations for oral administration may take the form of, for example, solutions, syrups or suspensions, or they may be presented as a dry product for constitution with water or other suitable vehicle before use. Such liquid preparations may be prepared by conventional means with pharmaceutically acceptable additives such as suspending agents (e.g., sorbitol syrup, cellulose derivatives or hydrogenated edible fats); emulsifying agents (e.g., lecithin or acacia); non-aqueous vehicles (e.g., almond oil, oily esters, ethyl alcohol or fractionated vegetable oils); and preservatives (e.g., methyl or propyl-p-hydroxybenzoates or sorbic acid). The preparations may also contain buffer salts, flavoring, coloring and sweetening agents as appropriate.

[0200] Preparations for oral administration may be suitably formulated to give controlled release of the active compound.

[0201] For buccal administration the compositions may take the form of tablets or lozenges formulated in conventional manner.

[0202] For administration by inhalation, the compounds for use according to the present invention are conveniently delivered in the form of an aerosol spray presentation from pressurized packs or a nebulizer, with the use of a suitable propellant, e.g., dichlorodifluoromethane, trichlorofluoromethane, dichlorotetrafluoroethane, carbon dioxide or other suitable gas. In the case of a pressurized aerosol the dosage unit may be determined by providing a valve to deliver a metered amount. Capsules and cartridges of e.g. gelatin for use in an inhaler or insufflator may be formulated containing a powder mix of the compound and a suitable powder base such as lactose or starch.

[0203] The compounds may be formulated for parenteral administration by injection, e.g., by bolus injection or continuous infusion. Formulations for injection may be presented in unit dosage form, e.g., in ampules or in multi-dose containers, with an added preservative. The compositions may take such forms as suspensions, solutions or emulsions in oily or aqueous vehicles, and may contain formulatory agents such as suspending, stabilizing and/or dispersing agents. Alternatively, the active ingredient may be in powder form for constitution with a suitable vehicle, e.g., sterile pyrogen-free water, before use.

[0204] The compounds may also be formulated as compositions for rectal administration such as suppositories or retention enemas, e.g., containing conventional suppository bases such as cocoa butter or other glycerides.

[0205] In addition to the formulations described previously, the compounds may also be formulated as a depot preparation. Such long acting formulations may be administered by implantation (for example subcutaneously or intramuscularly) or by intramuscular injection. Thus, for example, the compounds may be formulated with suitable polymeric or hydrophobic materials (for example as an emulsion in an acceptable oil) or ion exchange resins, or as sparingly soluble derivatives, for example, as a sparingly soluble salt. The compositions may, if desired, be presented in a pack or dispenser device which may contain one or more unit dosage forms containing the active ingredient. The pack may for example comprise metal or plastic foil, such as a blister pack. The pack or dispenser device may be accompanied by instructions for administration.

[0206] The examples below are provided to illustrate the subject invention. These examples are provided by way of illustration and are not included for the purpose of limiting the invention in any way whatsoever.

### 6.0 EXAMPLES

### 6.1 Generation of a Library of Mutated Mouse ES Cells Defined by GTS Sezuences

[0207] The retroviral vector VICTR 3, described in detail in U.S. application Ser. No. 08/728,963, filed Oct. 11, 1996, was used to generate a library of gene trapped ES cell clones that represent a portion of the described GTSs. A plasmid containing the VICTR 3 cassette was constructed by conventional cloning techniques and designed to employ the features described above. Namely, the cassette contained a PGK promoter directing transcription of an exon that encodes the puro marker and ends in a canonical splice donor sequence. At the end of the puromycin exon, sequences were added as described that allow for the annealing of two nested PCR and sequencing primers. The vector backbone was based on pBluescript KS+ from Stratagene Corporation.

[0208] The plasmid construct was linearized by digestion with Sca I which cuts at a unique site in the plasmid backbone. The plasmid was then transfected into the mouse ES cell line AB2.2 by electroporation using a BioRad Genepulser apparatus. After the cells were allowed to recover, gene trap clones were selected by adding puromycin to the medium at a final concentration of 3 μg/ml. Positive clones were allowed to grow under selection for approximately 10 days before being removed and cultured separately for storage and to determine the sequence of the disrupted gene.

[0209] Total RNA was isolated from an aliquot of cells from each of 18 gene trap clones chosen for study. Five micrograms of this RNA was used in a first strand cDNA synthesis reaction using the “RS” primer. This primer has unique sequences (for subsequent PCR) on its 5′ end and nine random nucleotides or nine T (thymidine) residues on it's 3′ end. Reaction products from the first strand synthesis were added directly to a PCR with outer primers specific for the engineered sequences of puromycin and the “RS” primer. After amplification, an aliquot of reaction products were subject to a second round of amplification using primers internal, or nested, relative to the first set of PCR primers. This second amplification provided more reaction product for sequencing and also provided increased specificity for the specifically gene trapped DNA.

[0210] The products of the nested PCR were visualized by agarose gel electrophoresis, and seventeen of the eighteen clones provided at least one band that was visible on the gel with ethidium bromide staining. Most gave only a single band which is an advantage in that a single band is generally easier to sequence. The PCR products were sequenced directly after excess PCR primers and nucleotides were removed by filtration in a spin column (Centricon-100, Amicon). DNA was added directly to dye terminator sequencing reactions (purchased from ABI) using the standard M13 forward primer a region for which was built into the end of the puro exon in all of the PCR fragments.

[0211] Subsequent studies have used both VICTR 3 and VICTR 20. Like VICTR 3, VICTR 20 is exemplary of a family of vectors that incorporate two main functional units: a sequence acquisition component having a strong promoter element (phosphoglycerate kinase 1) active in ES cells that is fused to the puromycin resistance gene coding sequence which lacks a polyadenylation sequence but is followed by a synthetic consensus splice donor sequence (PGKpuroSD); and 2) a mutagenic component that incorporates a splice acceptor sequence fused to a selectable, calorimetric marker gene and followed by a polyadenylation sequence (for example, SAâgeopA or SAIRESâgeopA). Also like VICTR 3, stop codons have been engineered into all three reading frames in the region between the 3′ end of the selectable marker and the splice donor site. A diagrammatic description of structure and functions of VICTRs 3 and 20 is provided in FIG. 1.

[0212] When VICTRs 3, 20, and various variations thereof, were used in the commercial scale application of the presently disclosed invention, many mutagenized ES cell clones were rapidly engineered and obtained. Sequence analysis obtained from these clones has identified a wide variety of both previously identified and novel sequences. Each of the sequences presented in SEQ ID NOS: 1-1,206 identify heretofore unknown coding regions of mammalian genes. Moreover, given that totipotent ES cells have targeted, each of the disclosed mutants effectively represents genetically engineered animals that incorporate the mutated cells and that are preferably capable of germline transmission of the listed mutations.

[0213] The discovery potential of the presently described invention as a genomics resource becomes apparent when one considers that the genes mutated/represented in the Sequence Listing were identified in a few years, whereas simply constructing the mutated cells would have taken many decades of person-hours using conventional methods of genetic manipulation such as targeted homologous recombination.

[0214] Additionally, and perhaps more importantly, the gene trap sequences thus far identified provide novel sequence information (see SEQ ID NOS: 1-1,206), and, because of the functional aspects of the presently described ES cell system, the cellular and developmental functions of these novel sequences can be rapidly established.

[0215] The cloned 3′ RACE products resulting after the target ES cells were infected with VICTR 20 were purified using conventional column chromatography, (e.g., S300 and G-50 columns), and the products were recovered by centrifugation. Purified PCR products were quantified by fluorescence using PicoGreen (Molecular Probes, Inc., Eugene Oreg.) as per the manufacturer's instructions.

[0216] Dye terminator cycle sequencing reactions with AmpliTaq® FS DNA polymerase (Perkin Elmer Applied Biosystems, Foster City, Calif.) were carried out using approximately 7 pmoles of sequencing primer, and approximately 30-120 ng of 3′ template. Unincorporated dye terminators were removed from the completed sequencing reactions using G-50 columns as described above. The reactions were dried under vacuum, resuspended in loading buffer, and electrophoresed through a 6% Long Ranger acrylamide gel (FMC BioProducts, Rockland, Me.) on an ABI Prism® 377 with XL upgrade as per the manufacturer's instructions. The sequences of the resulting amplicons, or GTSs, are described in SEQ ID NOS: 1-1,206.

[0217] All publications and patents mentioned in the above specification are herein incorporated by reference. Various modifications and variations of the described method and system of the invention will be apparent to those skilled in the art without departing from the scope and spirit of the invention. Although the invention has been described in connection with specific preferred embodiments, it should be understood that the invention as claimed should not be unduly limited to such specific embodiments. Indeed, various modifications of the above-described modes for carrying out the invention which are obvious to those skilled in the field of molecular biology or related fields are intended to be within the scope of the following claims.

The application's sequence listing, which the Patent Office published only in electronic form, follows.

SEQUENCE LISTING (1206 sequences)

SEQ ID NO: 1 - DNA, 157 bp, Mus musculus
  misc_feature (1)...(157): n = A,T,C or G
ttcactcttgtttttattcatantngagnactgcgtanacttggtttcaaagcctatgaagtgaccgacaggagggacagaagtccaaaggcatccttcaatacataatccaatccagcctggtctacagcgtgagttccaggacaaccagggctac

SEQ ID NO: 2 - DNA, 361 bp, Mus musculus
  misc_feature (1)...(361): n = A,T,C or G
aaccctttgaaaccccctgatttaaggntaaaccgcacactgcncgcactaannagctgatngaaaatngatttgattctnnttatgancctccncgtcccgtngtgngnccancacaancaaggcctggctctgggacctcagacattccaacaaggagactaaccggggctgganagatggctaagtggttaagagtactgagtgctcttccanagatcctgagttcaaatcccagcnaccacatgggggctcacaaccatctgtaatgggatccgctgccctcatctggtgtgtctgaagatagcaacagngtactcatataaataaataaataaataaataaataaataaattaata

SEQ ID NO: 3 - DNA, 135 bp, Mus musculus
  misc_feature (1)...(135): n = A,T,C or G
gaccttcgggagagcaatcggtgctcttaaccactgagccatctctncagcccatggggaacatttttgcgccactacatccaagaatacctccccccaaagcatgaagagaccctgagatgaaaagagaaaaaa

SEQ ID NO: 4 - DNA, 247 bp, Mus musculus
  misc_feature (1)...(247): n = A,T,C or G
attccattcctaaaaaaagggggtatgatgatctgccaagnggaatgcncaccgccccattaagaatgaccaccccgggctggagagatggctcaaaggttaagagcaccggctgctcttctgaaggtcctgagttcaattcccagcaaccacatggnggctcacaaccatctgtaatnggggatcttnangccctcttnntggtgtgtctgaagacaggtggatgggttgttacttcatataacaa

SEQ ID NO: 5 - DNA, 256 bp, Mus musculus
actgagagcaattatcacattgttgaagccttggctggtgcctacaccctcccacacaggacctcacgctcccatagaagccacccacagaggcagcaccttaaagtgtgatgtggatcccagatttcccaaggcttcctttcgactacgacaaagtgtgacaaaaacaagatctgtctgtaatcttgtctgggaacagagaaataaacattgttccaaaaagaataaatggccaaatatctcctaaaaaaaaaaa

SEQ ID NO: 6 - DNA, 412 bp, Mus musculus
  misc_feature (1)...(412): n = A,T,C or G
ggggtctttcctcctgngctgaggacctgnaagcctcccaatccagctgacagatttatgaagagcagcagnggnaaccgcatgaagccttgggactcaggaacctctattgcgttcttcaaacacattcacgcgcccgtttgtttgtttggttttttgnttttcgagacagggtttctttgagtagccttggctgtcctggaactcactctgaagaccaggctggccttgtactcagaaatttgcctgcctctgcctctgagtgctgggattaaaggcgtgcgccaccacgccccgctcagtggttaagattataggttgctctttcagaggacctgatacccttttccatcctcttcaagcaccagacacacacataaaataaagactaatataattttaaaaaaaaaaa

SEQ ID NO: 7 - DNA, 211 bp, Mus musculus
  misc_feature (1)...(211): n = A,T,C or G
actgagggctaggaagctactctgcccccaaggacaagagctacgttttggaaggacactggggtggctcaaaggtcaagaggaagagctactacagcagacaggcaggatnctgggcancccgnaccttctttctaaaacaccatggcttggatactgctgctgctgctgctgctgctgccctggccactaggctgagtctttgcgttca

SEQ ID NO: 8 - DNA, 235 bp, Mus musculus
  misc_feature (1)...(235): n = A,T,C or G
tttcgagacaggggttctctagnatagacctggnctggcctggaactnactctgtanaccatgctggcctcgaactcanaaatctgcctgcctctgcctcccaagttttgggattaaaggcgggngccaccacncccggctcgnaaagagttaanacnataaagaagcaaagagcgggatgatgcaaacnnggggaagnctaaggcaccctcgaggactgtataggatagagcga

SEQ ID NO: 9 - DNA, 353 bp, Mus musculus
  misc_feature (1)...(353): n = A,T,C or G
cctgcactggagacctgttgactgactgagctggcttgntcanaggatggatgctgtnacaatggcnaaatctagtggatgctcacagncanctaatggntggatcatanggctcccaatggaggagctagagaaagtatccataggagctaaagggatctgcaaccctatangtggaacaacattatgagctaaccagtaccccggagctcttgactctagctgcatatatatcaaaagatggcctagtcggccatcactggaaagagaggcccattggacttgcaaactttatatgccccagtacaggggaataccagggccaaaaagggggagtgggtgggcaggggagt

SEQ ID NO: 10 - DNA, 392 bp, Mus musculus
  misc_feature (1)...(392): n = A,T,C or G
atcatcctgcttctacatnnagaatgctggngattatnggcatggnccncaccagctcnatgtcatgctnaggaacaaacccagagcttnatgcaagcaagcaggcatgcaagcaagcaagcaagcacngcaagcagncaacattttaccagctctgnnccatccctaacccctttctcttctcctggggctggcgagatggctcaaangttaagagcactgnctgcttttccagaggnnctgagttcaaatcccagcaaccacatgatggctcacaaccatctgtaatgagatctganaccctcttctggtgtgtctgaagacagctacactggacttatgnataataataaatctttgggcaagagcgagnagaaactaagcgagtgcag

SEQ ID NO: 11 - DNA, 444 bp, Mus musculus
ggtgtttgctgcatgtgaatagaggtgcccatggagaccagagacgtcagatcctgtggagctggagtcacaaacgcctgtaagccacctgatgaggctctgtgtcctcatcctctggacaagcagcccgtgagcttaaccactgagctatttctccagcccctggaccagactgtcctccaccctgacctccacctttttttaaaaaaagatttattatatgtaagttcgctgtagctgtcatcagacactccagaaagagggagtcagatctccttatggatggttgtaagctaccatatggttgctgggatttgaactcaggaccttgggaagagcagttgagtgctcttacccactgagccatctcactagcccctgacctcctccttctttaacctcctaattgctgggactaccgttgtgtgctaccacacctggctg

SEQ ID NO: 12 - DNA, 282 bp, Mus musculus
  misc_feature (1)...(282): n = A,T,C or G
gtggagttggaaggaagttcttgagatgagaaaattgtacagaagagcaaaaaagtgactctcaggtatttgggggatccatatactanaaatgttntgggagcnatggagatggctcagcaggtaangacacttgccaccaaacctgatggcctgaatttaattcccagaactcaacgtggtgaaagaagagattgaattgtactctgacctctatacaaattcacatacntacattaataaatgtgaaattttaataanaatgaggacatgatggctcta

SEQ ID NO: 13 - DNA, 186 bp, Mus musculus
  misc_feature (1)...(186): n = A,T,C or G
atatatagcctgcctctgcctgtnaatgctagaattaacaggctngtgccatcgctacttgcnactaactggggacnnanagagctttnatgcntatattntgagacancatctgnaatggctattcctgggtgccnncttgactatatctggaataaaatacaatccagaattgaaaaaaaaaaa

SEQ ID NO: 14 - DNA, 179 bp, Mus musculus
ggtcctgctgtactttgttggtcatgagtgagtttcttgttccaatgctgtgtggaatagcaacgctggcctgacttcagatccctgcactgagagcatgccttgacttccctcactgacttaccttgacctggaattgtgagccaaaataaaccctttcctcccctgaaaaaaaaaaa

SEQ ID NO: 15 - DNA, 284 bp, Mus musculus
ggtgtctcggaacaaggtttctctgtgtagttctggctgtcctagaactcagagatccacctacctctgattcaaaggactaggattaaatgcccggttaaagaagatactccagggctggagagatggctcagtggttcagatcacagactgctcgtccagaggtcctgagttcaattcccagcaaccacaaggtggctcacaacacctcttctggtgtgtctaaagacagcaacagtgtattcatgtacattaaatgaataaataaattgtaaaaaaaaaaa

SEQ ID NO: 16 - DNA, 159 bp, Mus musculus
tgtttggatcaaaaggatacctgtccagactctagaacctgcctggaagggacccagccctgtcatcctcaccatcccaactgctgtgaaagtagctagtgtcgtcccttgaagttatcactcccaattaaagaaagccattgaggatgaaaaaaaaaa

SEQ ID NO: 17 - DNA, 159 bp, Mus musculus; identical to SEQ ID NO: 16

SEQ ID NO: 18 - DNA, 159 bp, Mus musculus; identical to SEQ ID NO: 16

SEQ ID NO: 19 - DNA, 329 bp, Mus musculus
gtatgcaaacagaaacagtcctaacgtggagtgtgatggcctgcccatgcctgtaactctgatgaactgcatccctggagctcaggtttgggaactccctgaagcacttgagtagggaccagtttgccacccatccccagccttttcttcctcttattcaagatttacatgttttcgctgggcagtggtgggctcacacctttaatcccagcacttgggaggcagaggcaggtggatttctgagtttgaggccagcctggtctacagagtgagttccaggacagccagggctatacagagaaaccctgcctggaagaaccaaaaaaaaa

SEQ ID NO: 20 - DNA, 344 bp, Mus musculus
  misc_feature (1)...(344): n = A,T,C or G
gactttgcctgtctgtcctggaggatggaaacaaaatgactctgatgaaacccaagacaagcagaatgaagaagctgtgcctggtggaccaggaactgtagccacccaccactgcgtatcanacaccaccatgcatanntggtagagggncttggananatgannnaccntggnttnnatancgtgatcacccntgnntggtggcncacacctttaatcccagcactcangangtacaggcaagcanatctgggagttanaggcttgncnggncanctnaataatgntggaaaaaagccttgantgttnnaactcaaggagacagagcccgggagatcttttga

SEQ ID NO: 21 - DNA, 243 bp, Mus musculus
  misc_feature (1)...(243): n = A,T,C or G
aaggagtgataaaggcatgtatcaccatggctggctaggaggnngcttttagtcatttttaantttttaaagacttatttattttttagcagggggtggggggacacacctttaatttcancccttgggaancanagataganatatttctgtgagtncaagngcngcctantctatatagcaagtnccaggncagcnagggctatacagagaaaccctggctcaaaaacaaaaccaaaaaaa

SEQ ID NO: 22 - DNA, 221 bp, Mus musculus
  misc_feature (1)...(221): n = A,T,C or G
tagtcggtccctcaaaacacagnaaacttgggactgganaaatggctcancggttaaaaacactgactgctctnccaaaggtcctgatttcaactcccagnaaccacttggtggctcananccatctntaatnaaatctgacnccctcttctggtcttcaaacncacatntaaaaaactgctgtatacataatnaataaataaatctttacaaaaaaaaaa

SEQ ID NO: 23 - DNA, 360 bp, Mus musculus
gtttccaaaatgcctttccaggctaaaacccaggttgtggtctgctggccagacacaacaggatgactctcaaaacagacaaaaactgtccagcaggcccgcaagacacctaactgttcacagggtgtgaactcactggttctcagagccctgaataaagtgcaacgtaaagattcgattcctaagggctaggatgttggttctatggttaagagcactgactggtcttaaagaggacccaggttcagatcccagcactaacatggtgcttcacagccatctgtaactccactttcgggagatctgtcgccctcttatggtcgcaatgggcactgcatgtgcatggggcatattccttac

SEQ ID NO: 24 - DNA, 187 bp, Mus musculus
gcacagcagtgtaaacttggaaaagggaagatgcagcagggtcctggtagcccagtttttgccatgctgagatgagttcaagatgtgagcccgtgcctgctgcctgctgtctctgagccaccgttttggaccctaaccctctggaaccataatccccaataaactctcccttctatcaaaaaaaaaa

SEQ ID NO: 25 - DNA, 216 bp, Mus musculus
  misc_feature (1)...(216): n = A,T,C or G
gactgagctcccctcngctccggtacaccttgttgctgctgctgnngctgctgctgctgctgtcngctgctgctgctgctgctgctgatgctgctgctgttgctgctgctgatgctgctgctgnngctgctgctctattatnggcanagagcaccttggatttgtttatattgatcaaacttgnaaaaatatgaaggaatataaaagcataaaaaa

SEQ ID NO: 26 - DNA, 298 bp, Mus musculus
  misc_feature (1)...(298): n = A,T,C or G
caactgagggaggagatgtagnctcccctnccccagcctgaaacntgcttgctcggggnggaagctncctgctnattcgttntaccacgcccactgctggaacctgangagccacacacntgcacctttctacnggaccagaaattattcnnngggaatngggncccctcccccttccttcataactagtgtcgaaacaataaaatttgagccttgctccgaaaanngatattnataaacttaaatgaaaancnatcctaaantccgtatggggangctcatgcaaccttgactgaaa

SEQ ID NO: 27 - DNA, 183 bp, Mus musculus
  misc_feature (1)...(183): n = A,T,C or G
gactgagagacccaagagtgcaccacctttcctggagctgaagttacagaangntatgagctactactgtgttggttctggaaacaagacctagggtcctctgcaaaagcagcagaatacttatttgctgaggcatctctccagcccctcaacttcattcttttcactcccccccccccttaa

SEQ ID NO: 28 - DNA, 307 bp, Mus musculus
  misc_feature (1)...(307): n = A,T,C or G
ctgggaattgaactcggcacctttggaagaacagcatagtactctnaaccactgagccatgtntccagcccataactgtttttatttggtaactattataggancaaaattgtnngngatgtagaactganggcctatgggcnggcgagattggtcaggtgnnnaagaacactgantggcantncaaaggcnntgagnncaaatcccagcaaccacatggngactcacaaccaccngggaatgagatcttacgccctcttctggngtatcacaagncagctacngggnactcatgtataataataaa

SEQ ID NO: 29 - DNA, 267 bp, Mus musculus
  misc_feature (1)...(267): n = A,T,C or G
ccttggtgtctctgaacagcattctgaaaactgcgagctgagcaagagtatccaccctctgggcaactgctctggatcattctccaacaacttgcagntcattaaactaaagaaacccatagcctggtagcggtggcacacacctataatcccagaacttaagaggcagagccaggtgggtctctgagttcaaggccagcctggtctacagagccagttccaggacagccagagctacacagagaaaccctgtctagaaaaaaaaaa

SEQ ID NO: 30 - DNA, 244 bp, Mus musculus
gactgaggtgttcctggagaccttgggtgtcagagaggcttctttgcaagaggacctgggtccctgggtctgtgtccctgcgttccacatactggctcacaactgtctgtaactgcagttccaggagctccagcgccctcttctggcctttgtggcactgcattaacacagtgcatctatgtccaggccgaacatcatacacataaaagaataaaatagaaaatgtttgagttaaaaaaaaaaa

SEQ ID NO: 31 - DNA, 134 bp, Mus musculus
  misc_feature (1)...(134): n = A,T,C or G
tggaacctggggagccacacactgtgcncacttantactggaccagagattatncggccgggaatctgggtncnntnccgcttgcttcataacgtgagngtggcagcagtgaaattnggagctttgatcagaaa

SEQ ID NO: 32 - DNA, 262 bp, Mus musculus
  misc_feature (1)...(262): n = A,T,C or G
gtacacgtactgagtaccagtagagtcagacctctccagctgaggtccctgctggctgagctgngaaagaagagcccctcaccaaccaccacttccttcccgctggcctgcttgaggtcttggggtgaagatcaggtggctcaagtttgagacacaatgctgccttggagactcctgggctcttcctgacatcctcctgcctcagcttcctgggaagctggaactacagtcaaaacaataccacatacaactctcttacaca

SEQ ID NO: 33 - DNA, 162 bp, Mus musculus
  misc_feature (1)...(162): n = A,T,C or G
cctgggagctggagttcaaggtaattgtgaaccacttgctaagtgatgcttgcngcctcatatggtaggagagctaactcctgcaaactgtcttcttatctccactgtggcatgcccctcaataattaaataaataaacaaataaattgtcaaaaaaaaaaa

SEQ ID NO: 34 - DNA, 259 bp, Mus musculus
gactgaggaccttcctaagaaaagggggtatgatgatctgccaagtggaatgcagagcgccccattaagaatgagcaccccgggctggagagatggctcagaggttaagagcaccggctgctcttctgaaggtcctgagttcaattcccagcaaccacatggtggctcacaaccatctgtaatgggatctgatgccctcttctggtgtgtctgaagacagtgatggtgtactcatatacacaaaagaaagaaagaaaaa

SEQ ID NO: 35 - DNA, 254 bp, Mus musculus
  misc_feature (1)...(254): n = A,T,C or G
agactccgagcaaggacatctaacagtgaggtggatatttcctgtgctcctattcatcttaaaaagaccccttccgggggctggtgagatggctcagtgggtgagagcacccgactgctcttccgaaggtnaggagttcaaatcccagcgaccacatggtggctcacaaccatccgatcacgagatctgactccctcttctggagtgtctgaagacagctacagtggtacttatatataataaaataaataaat

SEQ ID NO: 36 - DNA, 161 bp, Mus musculus
  misc_feature (1)...(161): n = A,T,C or G
ggggagcactgtgaagcagatggnttatggttaattaactgatagatnatgngatctaaccaccatatttctttgagtggaaanacaccgcttgggggctagagagatggctcantggnaaagagcatntgactgctcttctgaaggtcctgagttcaaat

SEQ ID NO: 37 - DNA, 245 bp, Mus musculus
tgaggagttgctttccacagtgaaagagaaaagtctgtgctggtcagatgactcggtggataaagatgtttgttaccaaccctgatgacctgagttccaccctgaagccccacgtagtaggagacaactgagagcctctgacttccacatgcatgcactttgcagtaagtatgcaacaccccaccctaccaatgagagaatggatgaataaataaataaataaataaataatcacaaaaaaaaaa

SEQ ID NO: 38 - DNA, 280 bp, Mus musculus
  misc_feature (1)...(280): n = A,T,C or G
gaactgagggctgtgatcacaggcgggcnncggcttgcctacctacctccagctcgacggcnnaaagancttctntttnacgtctngaangtattaaagccaccatgctngggctggagagatggctcactgatgtaagagcactgattgctcttccagaggtcctgagttcaaatcccagcaaccaccgtggtggctcacaaccatctataaaaaggatctgatgccctcttctggtgtctgaagacagctacagtgtactcatataaataaaataaaa

SEQ ID NO: 39 - DNA, 279 bp, Mus musculus
  misc_feature (1)...(279): n = A,T,C or G
gactgagggctggggataacaggcgggngncggcttgnctacctacctccagctcgacggctnaaagancttctnttttacntcaagaanntaataaagnanacatgcnngggcnggnnaganggctcactgatgtaagagcactgattgctcttccagaggtcctgagttcaaatcccagcaaccacgtggtggctcacaaccatctataaaaaggatctgatgccctcttctggtgtctgaagacagctacagtgtactcatataaataaaataaaa

SEQ ID NO: 40 - DNA, 310 bp, Mus musculus
  misc_feature (1)...(310): n = A,T,C or G
gcatccgctggagcccgtggagatctgaagagggcctcnattccctgaaaatggagntacngatggttctgagcttncacgnatatgttgggaatcaaacccaggttccctggaagagcaagggctcttaactgctgagtgatgcatctctccaacccctccagatgctatgttatcgcatatgctcttctataatgttatggngatactctnnccttacaatgnangagngatgcatatatacaacccctncagatgctatgttatcgcatatgctcttctataatggtatgttgatactcttccctta

SEQ ID NO: 41 - DNA, 328 bp, Mus musculus
gactgagagttatttcaggtggatgggtgctttgcctgacatatatatgtgtaccacatgtgagcctggtacctacaggggacagaagaaggtgttggttcccccagacctggagttacagatggctgtgggccagcattctctgtgagagtaatgagagctgcccgaggctaagtcattcctccgtacacttccctaggcttcatcagctcctttttgtccagcaagggatttacaaagtgagtttcaggacagccaggggcagcacagggaaaccctgtcttgaaaagcaaacaagtgtgtgccacctctgactgaaaaaaaaaaa

SEQ ID NO: 42 - DNA, 210 bp, Mus musculus
  misc_feature (1)...(210): n = A,T,C or G
gactgagactttacgtaaaattctatgggcttctgtggccaggtatcggnggnacaccccttaccctagcactcaggaggcagagtctggtggatttctgagtttgaggccagactctggtctgcagaatgcagttccgagccagccagagttacacattgngatcctgtctccaaaacaaataaagagccagaaatgtaaaaaaaaaaa

SEQ ID NO: 43 - DNA, 367 bp, Mus musculus
  misc_feature (1)...(367): n = A,T,C or G
taaggagcccttgcccaagattctcagacacaggagactacctggtctgccaggtgccatcactctgggnttcatggagagggctagacgccattanacaactcttctggccaaacacccacagcagacattgaaaagaaattaaatgaaaactcttggggctggagagatggctcagcggttaagaacactgactgctctttcgaaggtcctgagttcaaatcccagcaaccacatagtggctcacaaccatccgtaatgagatctgactgccctcttctggtgtgtctgaagacagctacagtgtactcacatataaataaataaataaataaataaataaataaataaatcttaaaaaaaaaaa

SEQ ID NO: 44 - DNA, 286 bp, Mus musculus
  misc_feature (1)...(286): n = A,T,C or G
tgaagctagcccatctgtcctgagctngtgatggctncnnntctatagggggagagacagagagacttgngagnagnncctgtgaggaatctcaacactccatcaggtgaggctcactggttaagagcaccgactgctcttccaaaggccctganttcaaatcccagcnaccacatggtgnctnacaaccatccgtantgagannngacaccctcttctggtgtatctgaagacagcgacagtgtactcagataataatantaaataaatcttaaaaaaacgaaaa

SEQ ID NO: 45 - DNA, 167 bp, Mus musculus
  misc_feature (1)...(167): n = A,T,C or G
ttgataccaaccctgntgacctganntacaccctgaagccncactntatgantgagacanctgagagcctntgacttncacatgnntgcactttgnagtnagtatgcaacaccccaccctaccaatgagagaatggatgaataaataaataaataaataaataatca

SEQ ID NO: 46 - DNA, 272 bp, Mus musculus
  misc_feature (1)...(272): n = A,T,C or G
cttttctccttctatgaactgctggagcacatgacagggntgggtgtgcgatgtnaaagctncaggatctccatgacacatgagcaacaactggacatctgagaggagtcctgctgagcatccagtactcataagagtgcagcagaanccataggcctggaaccagaccaatgactccaatgactcgntngcactgaacaagtnaagctgcgtgagcaaaatggtgtgnnacacacaagagctgtggnacataccataacactctgcagctt

SEQ ID NO: 47 - DNA, 163 bp, Mus musculus
  misc_feature (1)...(163): n = A,T,C or G
tgtgaaactctccaantgnattcnggngnntnnggtgaggcctnctgtgngaactacactaangacttgcctctaatgaacctcaacatgataaaagtcataggatgncctttctgaggttagattaccaaaacaaacaaacaaacaaacaaacaaacaaaaa

SEQ ID NO: 48 - DNA, 374 bp, Mus musculus
  misc_feature (1)...(374): n = A,T,C or G
ggattgcggccagtctaggctaaagnggcctgctgataacaggtgtcagatggaagaacacngggnnctccagcatttggaaaccagaggcagaagtatcaggaagtccacagccggcttcagcaatataaaaattccaagtcagcttagactatgtgataccctgtcctaaaataaagctagagggggcttggtgagatggctcancggttaagagcactgactgctcttccaaaggtcccgagttcngaatcccagcaaccacatggtggctcacaaccatccataatgagatctgacnccctcttctagtgtgtctgaagacaactacagtgtacttacatataataaataaatcttttaaaaaaaataaa

SEQ ID NO: 49 - DNA, 293 bp, Mus musculus
  misc_feature (1)...(293): n = A,T,C or G
aactgaggttttctctgtgtactcctggctgtcctggaactcatgctgaagaccagaagcgcctcaactcagaggttggcctacctctgcctcctactcctgaatactggggtcaagtcctgtgccaccaccatcctgttctggttttgttgttgttgatggtgttctttgagtcaaagtttctctgtgtagacctggctgccctggaatttgttttgtagatcaggctggtctcaaattcngagatccacctacttctgtgattaaagtcatgtcccaccataaaaaaaaaa

SEQ ID NO: 50 - DNA, 266 bp, Mus musculus
  misc_feature (1)...(266): n = A,T,C or G
gactgagaagaagaagaanaagaagaagaagaagaagaagaagaagnagaagncgaagagnccnnatccnaccttgntgantgcngaagnccncataaggctggtgtganatctacactnagcacttnagcacgtnnnnngccaaaagcaggcnantgtgactctattanngacctacaacctttaatacagtcanttgatgctgagctgataatggctctgattgttcattgccccattcatttaattggagaaaaacaaataaa

SEQ ID NO: 51 - DNA, 191 bp, Mus musculus
ctggacagaagcccgggagccgaaacaatgggccatatcctttaacaacctgctgactgctgactgccacataggcttctgtaagatctacactgttcactccacactgtgggtttagaccagtgtttctcaagcttcacaatgctgagaccctttaatacagttcttcatgctgtgctgaaaaaaaaaaa

SEQ ID NO: 52 - DNA, 295 bp, Mus musculus
  misc_feature (1)...(295): n = A,T,C or G
gaactcaatctgcagcangangcangncnccagctgaactnngngcatnnctctgccactgacaagacctgatcacacatcactangtcctanctgnnnccacaacttntgggtctgcangcctgattaattcatgttcctagcaagancccanntgaagctgagatgctgctgctgtgaatggcctagctcctgcttnctgacnngnntgagttccagncctgacttccttggtgatgaacagcaatgaggaagtgtaagctgaataaaacctttcctccccaaaaaagaaaaa

SEQ ID NO: 53 - DNA, 387 bp, Mus musculus
  misc_feature (1)...(387): n = A,T,C or G
ctagaagacagtggactgaacctctgaancngnnaccnacncccanttacatgttgnccttanaangaccaaanangaccanagtcacntatctaataccaggaagtntacacgctgtttcagccctaaccaanaagctntnngtaattgnnatctgatggcangnaaaangnggtgtctnccatgaaatatcacagggtgcaccaancacactgnagggcaggccctatgctcaagataatngtctaacncaaaatgaactcaagctgcatgggattngctttnctctgacctacccctggcccaagacagggnttctctgngnaaccctggntggcctggaacactctctgtagaccaggctgncctcgaactcacagagatctg

SEQ ID NO: 54 - DNA, 374 bp, Mus musculus
  misc_feature (1)...(374): n = A,T,C or G
atgactcctgaggatcatttaccagaagggtntcagngcntcctccnctgagangaaaatganggatgtnanatgaatgantacctacatataaangaaggcngttacngaacaatgctacttcatggactnacnttnngtttatntttgnaanannncntgcatgnnttccctcctgttncnagaatggcaaccacaccctactancanccaacagcttctaattgacttaanaccttcttgacatgaaggagaccatgctgaggcctggaaatataggtagcttccccaaggctagtaaagtnatgtatcttggangagaagctacnacaactactttactaaatcagaataaaccctaatttcattctaaa

SEQ ID NO: 55 - DNA, 195 bp, Mus musculus
  misc_feature (1)...(195): n = A,T,C or G
cactttgttcacatctggtgcaagaggaagcttctctgaggaaggccacgcaagggaattctcatacacatcttaagaagatgaggcactggattttacttgaaaggctgaatctnttggttacctgcctaaagcctnggacggaagnctaaactttaagtagnaagtnaaacagtaaataaattctgctaatgg

SEQ ID NO: 56 - DNA, 210 bp, Mus musculus
gactgagcgcaggcatcaatccgatcagcaagcagttgactgtcctatagcagttacacaccttttgcctagcggatggttggtttgtgcgtcagcttgatagaagctaaagtcattggagagaaaggaggctcaattgtggaaatacctccatgagatccagctataaggcgaaaccccagagaaaccctgtctcgaaaaaccaaaaaa

SEQ ID NO: 57 - DNA, 263 bp, Mus musculus
gactgagctcttgcgtatagcgcctggcatacagaagatgggactgtttttaattagggggaaaaaggagaattacagtgcaaaggagaccatcgggctggagagatggctcagtggttaggagcactgactgctctgccagaggtcctgagttcaaatcccagcaaccacatggtggctcacaaccatctgtaatgggatccgatgtcctcttctggtgtttctgaagacagctacagtgtactcatataaaataaaataaa

SEQ ID NO: 58 - DNA, 226 bp, Mus musculus
acccttaaagaaaactgactttccctcccccagcagccatcaactcctcatctgaggagaaacttgtctcaagcaaacaaacaaagagaatcaatgtcttgttttagctttggcttcagtatgaagaagtactcaaaacagaccaaaccaaacagcagcagcagcagcagcaacaacaacaacaacagcaacaacaacaacaactacaaaatgaaacaacaaaaaa

SEQ ID NO: 59 - DNA, 242 bp, Mus musculus
  misc_feature (1)...(242): n = A,T,C or G
actcggggacgcccannatgncatcactgggaagtggaggcagangaatcnagntgaaagttatcctctgcgacataaaaggctcaggccagctggagaggtggctcanagggtaagagcactgaggtcctgagttcaaatcccagcanctacatggtgactcacgaccatctgcaatgggatccaatgccctcttctggtgtgtctgaagacagctacagtgtagtcatctatatacagta

SEQ ID NO: 60 - DNA, 276 bp, Mus musculus
aactgagaggccagaagaggacatcaggacccttgggactagagctgcagatgattgtgatctgcacatatggatgctggcaaccaaacccagatctgctataacagcagtgagtgcccttagcctctggactatccctcagacacggtttctctgtgtagcctttgctgtcctggaactcactttgtagactaggctggccttgaactcacagagatccaccagcccctgtgtcctgagtgctacaaccagactaaaacagcaaaaatttctaaa

SEQ ID NO: 61 - DNA, 229 bp, Mus musculus
  misc_feature (1)...(229): n = A,T,C or G
gactgagatcccaacattggggcagtagtgaggaactcgcactgtcagcgctgggcaatttaagaaccattaatcaatgacngctacngtcttcagatcaagatgcagaactctctgcttctccagcatcatgtctgcctgcacactgccatatttcctgccacgatgataataaactgaacctctgaaactgtaacccaaccccaattaaatgttttcctttataaga

SEQ ID NO: 62 - DNA, 192 bp, Mus musculus
  misc_feature (1)...(192): n = A,T,C or G
agaagtgggcactcanagaagacgaactcatctgatcatctggaactgnagttgctgntctgcagagagggcctnagcagntaanancactgactgntcttccanaagtcttganatcaattcctagcaaccacatggtggctcacaaccactggangatgagatctgaccccctnttctagtgtgactgaa

SEQ ID NO: 63 - DNA, 260 bp, Mus musculus
  misc_feature (1)...(260): n = A,T,C or G
gactttactcaaagtgtttcaagtcatagcctcaacatcaaataagcacctttactctcctgttcgaatggcagcacatcatctctttatgactcaaccccacgcaggatgccaaactctacctctgcggtaaccggaacacccaaaggngnnnggctgaaagaggcaagcgagcgggggttcatctgggcagagagagtctcttctcccaagcctgcctccctctctctctctctctctctctctctctctctctctct

SEQ ID NO: 64 - DNA, 363 bp, Mus musculus
gactgagactatggtctgaggaagccaggccccgtggttgtaagtaacaccaaccactgaaaagaaaatgaagtttagagatgactcatcaggtaaagacatttgcagccaagcctgagttcgatccctgcaacacacataatagattaagagaattgactttccaaagttgaacttatgctccacatgtgcaccatgcccacagggccacacaaccacacagaaataaagaaatttattaaatcccagcacttgggaggcagaggcaggcgaatattctgagttcgaggccagcctggtctacagagtaagttccaggacagccaggactatccagagaaaccctgtctcaaaaaacaaaaa

SEQ ID NO: 65 - DNA, 257 bp, Mus musculus
  misc_feature (1)...(257): n = A,T,C or G
gactgagagtggcctcaaatgcagacctggctatagccggnctaatgaagaacgctgcaaagcagnggatgttccagttcccagatgtttttgnacaggantttccagagctgnttgnatccttccagagtttctggtatcggttcctctaaagccagaaccatgtggccgaagctgccaagtttgtgtgctngctggggctggaacctggcccccttggtcaaatacattttccttnactgcttcaaaaaaaaaaa

SEQ ID NO: 66 - DNA, 430 bp, Mus musculus
  misc_feature (1)...(430): n = A,T,C or G
gaactgagggggccttntgctgccttntactccnattcacatgtactccaaccctcanncagccggntagttnncttctgngattcagagaaaccccgaagctatcaggaaaaagccttccactggccccagcgctctgacctgttctcatggatggacaggtgacctctccacctccaggagtcggccatgccgctctgcctgagtgtgaaccccagcctccacttcctgaatgaagttcatcactgctcctctcctctcacccctcccatcaacagacacatctcttaggaaaaccttgtcctctctcctctgtaccagtggctctcagacttcttaatgctgagaccctttaatacagttcctcatgttgtgacgctccctcctccagccataaaactattttggttgctatcccataaaaaaaaaa

SEQ ID NO: 67 - DNA, 215 bp, Mus musculus
  misc_feature (1)...(215): n = A,T,C or G
gcaaagtgtgcctacctgtgcaatagcagcatagctactgnggagataaccaactgtttcctgcttagatttgaggaaggaattctctctacaggagacaatccatgcctggtactatggtctaaagctcatggctatagaggaacctctactcttatttgctaaatggacatgctgtcaaacagccttctaaaatatttacatttataaccata

SEQ ID NO: 68 - DNA, 333 bp, Mus musculus
  misc_feature (1)...(333): n = A,T,C or G
aaagcccaacagggcacagagcanagaacaactggcggtggggtgcccaacaacaacggatgcatctgtaacccacaacccctacaccaaaggcacaggacattgtggagagggagcagaaagatggtaagagtcagaggaccgagaagtctgctgcaatctagattgtgaaagagaagctacatccgtgaactgtaaacaagacctgaacaatgaacagctgatgagagaggtaggattagtcttcccaaagggtgaggtccctaattggccatccaattttattttaattaaaaatagaataaattttaaaaattaatttaaaaaaaaaaa

SEQ ID NO: 69 - DNA, 309 bp, Mus musculus
  misc_feature (1)...(309): n = A,T,C or G
gaaacagcacgctttggccatcaatcaccaaggacctgagactgacgaacagcnacatcaggnggcttggaggtaaatcctctctgggttgaggttggagaagatagtatgtccatccaatacctttgcggcagcattntctangacggagagccncaggcacctanctgagctgtgcttgtgtctgcattcctgatggatgctaactatgggataatagctattattgttttaagttgctaagttttgggataattggctaagttgtaattggtaactaataaagaatctctaagctaaaaaaaaaaa

SEQ ID NO: 70 - DNA, 224 bp, Mus musculus
  misc_feature (1)...(224): n = A,T,C or G
tactggttcatgtttggtgtttgctattgaactggactgctggtatcttgacaatgaagagtggaattgcccccaagaattaaacaggtccatgatnccnttntacttttaaccttctttttnnactacctctggtcagngggntagaagggaagtttaagcttataagaaccctaaataaagtaggctttgaaaaagtcaaagccaaaacagaaaacaaaaca

SEQ ID NO: 71 - DNA, 332 bp, Mus musculus
  misc_feature (1)...(332): n = A,T,C or G
gactgagatcggatgtagaactctcagctccttcttcancaccttgnctgcctgcatgccgccatgcttcccaccatgttgacattggactaaacctctgaaactgtaagccagcaccaactaaatgttttcctttataagangngnacggcnaaagaatgggnggactaaaccntgtactgngcctgcttacagctgcaaatccttagccctctgtttaactctaacctgactttaggattcttcagacaacttggatcctcatctctgttcccagtgtgggcacattgaaaaagtctccttattctgcttttcactgttaaaaaaaaaaa

SEQ ID NO: 72 - DNA, 376 bp, Mus musculus
  misc_feature (1)...(376): n = A,T,C or G
actgagagatcgatagagccgtgggagganggaagagccagaggacggggtatgagcgctgtgaaatgctttcttcgggacaggatacattgactgcactcatgagctctctgcagctgtgactccctgcacaagttcaagtcatcattccaacagatactgcctggtngnntacaactgtnacaaaaacagattccaagaagaggaagagaagaaganaaggagagatgaaggagacagaagatgaggaaggaggagtactcactactacagacattttcnagncggctcctccagggacacaagctgaaactcaaaggtgantatcatattagtcaaaatatgaagggacagnccngacctttgagtattacga

SEQ ID NO: 73 - DNA, 222 bp, Mus musculus
aacatttggatggatatgtgcgcctggccatgtgaagataatggatatcaacttcagtggaattaaaacaaacagaacaaagaccctttatgtacttctgactgtcctggaacactactgtatgtagaccaggctgaccttgaacacgaagatctgcctgcctctgcctcctgagtgctggcattaaagaaatgcatcactgctcctgcctaaaaaaaaaaa

SEQ ID NO: 74 - DNA, 195 bp, Mus musculus
actgagagtctgatcatggattctcgttgttaattttccatgcatgtcaaacaccaaaagtgaacaacccgtgctggatagttttatgtcaacctgacacgagctaaagtcatctgaaaggaaggaacctcataagatgaacaagtgatatggaagtataagaaaaataaaccatctcttgctcaaaaaaaaaaa

SEQ ID NO: 75 - DNA, 282 bp, Mus musculus
  misc_feature (1)...(282): n = A,T,C or G
caggtgcccttaaccacggtanganacatctttcnnganaccngaaatncatttctttttaagcttctaggggctgnagagatggctccaaggttaagagcactgactgtccttccagaggtcctgagctcaattctcagcaaccacatggtggctcacaaccatctgtaatgagatctgatgccctcttctggtgtgtctgaagaaagcaatggtgtactcatatacataaaataaataaataaatcttagccgggtgnggtggcacacatggccagctga

SEQ ID NO: 76 - DNA, 359 bp, Mus musculus
  misc_feature (1)...(359): n = A,T,C or G
cacgaattctgctaaactatcatgaaataaccncaacatgaaccagaacagtaggatgccgtttcntgctgaccagaggcnctttatcctgtccagtaccttgactaagcagcatgaattcagagacttcactccactctttcacnggagtngcctaagactactgaaaaacacagatatttacactacgantnatnatagaaaaattacagtttaaaaataattctagccgggcggtggtggcgcacgcctttaatcccagcacttggcggatttctgagttcgaggccagcctggtctacagagtgagttccaggacagctagggctacacagctgntgnctcgaaaaacaaaaaca

SEQ ID NO: 77 - DNA, 163 bp, Mus musculus
  misc_feature (1)...(163): n = A,T,C or G
cattagtgctggcacgcccantgnctggancctgnggagccacacactgtgcaccttnntactggaccagagattattcggccgggaattggnttcnntncnncttgcttcataactgagngtggcancagtgataattggagctttgatcaagaaaaaaaaa

SEQ ID NO: 78 - DNA, 211 bp, Mus musculus
  misc_feature (1)...(211): n = A,T,C or G
ggcctccctgtttgagatcctgaagaagtgcatgtctgtggctgtcagcacaggnngagatctgttttttgtcagtcgccagatcagtgctttgaggtgcagggaacaaaagttagtatccanagcccatgccagccaggtctcccctcccccttccttcataactgagtgtcgcaacagnaaaattggagctttgatcagaaaaaaaaaa

SEQ ID NO: 79 - DNA, 167 bp, Mus musculus
  misc_feature (1)...(167): n = A,T,C or G
gtcctggtataagattcagaagtcttgnctttcagaaactcaagtgtcgtgctgaaacaaacaagaagtcaaagacagggtttctcaggctggtgagatgactcagcagttaagagcgccaactgctcttccaaaggnncagagttcaaatcccagcaaccacatgg

SEQ ID NO: 80 - DNA, 214 bp, Mus musculus
tgaggtttttctccagcctcactgggccactacttagagccaagaagcccttcctgtctctgtgtctttgaacttccggctccctccatcctacccccacctcagggaccagccattgaacctacagctttacaagggctaggcaagcattctacctcagagctatagcccagtccaagagctgtttcttcatttgttttgagacaaaaaaaaa

SEQ ID NO: 81 - DNA, 270 bp, Mus musculus
  misc_feature (1)...(270): n = A,T,C or G
actgaggtggggtctttcagtgagatggaagtaagtccanctactgtggaaagcagtatggaggctcctgagagaactgaagaaagggctttgatgtgatcgggagggaccactcctgagagcacaccagatgggttctaagncggcttgccatagaggtccgcgcaccaaggtgcctgttgctgtgctcctctgaatcagcccaattctaggaaccagtctggcgggtccatcaacagacgaatgaataaaagatgtgcaaacacaatg

SEQ ID NO: 82 - DNA, 248 bp, Mus musculus
  misc_feature (1)...(248): n = A,T,C or G
gactgaggtggtttggaagctgaacaaaatctggatggcttngnagacttgcttnangacaagaaactggcgagctaacagagatggctcagttggctaccttccaaagatccttgagttcaattcctagcaaccacatgatggctcataaccatctgtactgggatctgatgccctcttcttgtgtgtctgaagacagctacagtgtactcatataaataaaataaataaatcttgaaaaaaaaaaa

SEQ ID NO: 83 - DNA, 440 bp, Mus musculus
aactgaggcagcgtggtggccagaaaatcacagaagaagccagcccagaagcctcaaggacacatcaaggagtgacacacaccctatgtgccaaagtctgctgggctcagaaggctccatttagggacttattaaacaaaaggctgttgtttcaggctctgcccagttctagtcctcctcctggaatttagcaactgtgtgaccttcagcaaacaacccagcctttccgtgcctaattttatctgtaaaatgggaacggtgggaatatatcatctctaggattgtatcggggattccatcagctgactttgtttcgttcgagacaagattttgctgttagccttgactggtctggaacttgcctcaaattctcaaagatctgcctacctctgcctccccagtcctggaaataaagtcctatctaaccatgaaaaaaaaaa

SEQ ID NO: 84 - DNA, 336 bp, Mus musculus
  misc_feature (1)...(336): n = A,T,C or G
gaactgagatgaatctctgcanccccaaatgggtatcctcagaattacaacttccaagccccatattacactgttgccatcacaacatataagagactgaggcagaaggaccagttgntcaagatcatcttcaatctgcatagngagtcccacctgntctgnattntgncctactaggtaaaagggtctgtcccaagctggatggtggcacatgcctntaatnccagcactngngaggcnnaggcaggngnatttctgagntcaaggccagnctgntctacagagtgagttccangacagccaggactacacagagaaaccctgtcttgaaaaaaa

SEQ ID NO: 85 - DNA, 322 bp, Mus musculus
  misc_feature (1)...(322): n = A,T,C or G
tgaggctggtcttggactcctgctgtctcggctgagtactgagagactgaaaggccaatagtgtatcagctgccntgggnagggcttctggaccacatgacctcatggcggaggccaacacggtggactgtgtgaaagaagaggttctgggctggagagatggctctgtggttaagagcactgactgctcttccagaggtcatgagttcaattcccagcaaccacatggtggctcacaaccatctgtaatgggattgaatgccttctcctgatgtgtctgaagacagtgacaatgtactcacattcatgaaataaataaaaa

SEQ ID NO: 86 - DNA, 291 bp, Mus musculus
  misc_feature (1)...(291): n = A,T,C or G
aactgagcgtgtccgngaaggtgtcagcatatgtacattggngtttgccagtgtgtccgtgaaggtgtcanatcccctggaactggagttacagagagctgtgaactgccacgtgngtgctaggagttggacccaggncctcccgaanatcanncatctntctcccttacctacttcagnttctttcttgccactgtggctgncactttctgccatgaccccaccatgatggactcagaccctctggaaccataaaacaaagtaaaccctcttctcttttaaaaaaaaaaa

SEQ ID NO: 87 - DNA, 130 bp, Mus musculus
  misc_feature (1)...(130): n = A,T,C or G
tgtctgaagaagtcagaaaagggcttcagaacccctggaattacaagaggatgaattgcccaacatgggngntcggncctcagatcctctgcaagagcagtaaatgtttttaaacgctgaaaaaaaaaaa

SEQ ID NO: 88 - DNA, 198 bp, Mus musculus
  misc_feature (1)...(198): n = A,T,C or G
aactgagctttaactgccaccgtgacacaatttanaatcacctgggaagacagtcatttttaaaaatacttatttatgggncgggcattttggngcacgcctttaatcccagcacttgggaggcnnaggcaggtggatttctgagttcgaggccagtctggnctacagagtgagttccangacatccagggctacaca

SEQ ID NO: 89 - DNA, 198 bp, Mus musculus
gaactgagaagtctgccatggattctcgttgttaattttccatgcatgtcaaacaccaaaagtgaacaacctgtgctggatagttttatgtcaacctgacacgagctaaagtcatctgaaaggaaggaacctcataagatgaacaagtgatatcggaagtataagaaaaataaaccatctcttgctcaaaaaaaaaaa

SEQ ID NO: 90 - DNA, 230 bp, Mus musculus
  misc_feature (1)...(230): n = A,T,C or G
atgcactgtggagaagcttgattgcagcacnnatatgcctgtattctcaaaagaaaggaagcaagccagcaagccagcaagccgagcgtggtggcacatgccacccagcacccgggaggcagaggcaggcagatttctgagttcaaggccagcctggtctacaaagtaagttccaggacagccagggctacacagagaaaccctgtctcgaaagaacaaaatcaaaaaaa

SEQ ID NO: 91 - DNA, 340 bp, Mus musculus
  misc_feature (1)...(340): n = A,T,C or G
gaactgagatgttccggggaaacgttgctagcaaatacatacaggctggggagatggcgatcagtaaagtgcttggtgcgcaaccacaaanatctganttcgatacccaagcatgcactgtggagaagcttgatgcagcagtatatgcctgtattctcaaaagaaaggaagcaagccagcaagccagcaagccgagcgtggtggcacatgccacccagcacccgggaggcagaggcaggcagatttctgagttcaaggccagcctggtctacaaagtaagttccaggacagccagggctacacagagaaaccctgtctcgaaagaacaaaatcaaaaaaa

SEQ ID NO: 92 - DNA, 160 bp, Mus musculus
  misc_feature (1)...(160): n = A,T,C or G
ttaagcagcaccgactgctnttttcgaaggctctgagcttcanactccagnnaccncanggtgactnacaannatgtgtttganatccgataccctctnctggcgcatggtgaagacagctacggtgtacttagatataagannaacataaagctttaaa

SEQ ID NO: 93 - DNA, 328 bp, Mus musculus
  misc_feature (1)...(328): n = A,T,C or G
tttctgtgaatttgangttatcttaatctaagtacgcaagattccaggccaaccagagctacagaatgagaccctgtnccaaaanaggagtgactacaaagatctactganatggctcantgggtatgggtgcctgctgttaagcttnacaccttaagttcaattatcaggccccagatggtggaaggagagaacttctggactctacatgtgcaccacttgcgtatgagctcacacatatatatatgtatacacacaacnataaataaaaatataattaaatttttaactaataaaatttttcttgaatttcctctaaaaaaaaaaa

SEQ ID NO: 94 - DNA, 320 bp, Mus musculus
gaacgcacaaagaacttctcatggtgttatgcctgcttctggctgcttccgctgactcatgctgattcagcagagccttgctgtttctgctggatcgtcctgcagcttccgattcatgtttggtgtttgctattgacctgcactgctggtaccctgactactctactaagagagacttctaaacaggtccccagctccctttttctattaaccttatcccccacccccaccccccactccccaccttctggttgatgggttaggggagaggttgaagtgtttacgagccctaaataaagtaggttttgaaaaagaaaaaa

SEQ ID NO: 95 - DNA, 446 bp, Mus musculus
  misc_feature (1)...(446): n = A,T,C or G
gaacaatggagatggcncgagggancgtatggctanccatggtgtaaagtggagccgtgcacaggagacaaattctcatctcacacagaccccaggntactgagaagttggattgtaantgttgcctgacccaccacgancaagtnagctanctgagggaggagctagantggacatttccccacattcctcangtcagtcagagttggtaaatttaccaaaatactagctatcttattcgaatctctcaaaatggccattaaaattattttcttttgggctggagagatggtgcagcgattaggagcactgactattcttccagaggtcctgagttcaattctagcaaccacatggtggctcacaaccatctgtaatgggatccaatgntctcttctggngggnctgaaaaacgnaccnggnaatcccttccttaaattaattaa

SEQ ID NO: 96 - DNA, 159 bp, Mus musculus; identical to SEQ ID NO: 16

SEQ ID NO: 97 - DNA, 313 bp, Mus musculus
  misc_feature (1)...(313): n = A,T,C or G
agaatgctgcgagtgaccgntgatagatgaccatncgcntgttacagcagacgaacatgatacttcgcattatatggtgtntanccnttcatggatgaatncganacctactatgatgtgnatgannctcatanaggagtcgcccccgtccccaccttctcctcaggcgttctattcttcatcctctgagaatcatctagaactatctagtgcagcagctctcaaccttcctaatgcctcgaccctttaatatagttccttcatgtcgtggtgactccccaaacataaaattatttctgtcgctacttcataa

SEQ ID NO: 98 - DNA, 159 bp, Mus musculus; identical to SEQ ID NO: 16

SEQ ID NO: 99 - DNA, 302 bp, Mus musculus
ggttggccctaaaaagacttgtttgcttaaactttcaagaagaattccatgattgcaagtgaaaaggagaaggaaggattacgtcttaggcattgcctggaatcacattctctcagctaagccacagcatggctgtgctttggtttgaagataaaactcaatggttatgagcactgcatggtggctcacaaacatctgtaataggatctgatgcccttttctggtgtgagtctaaagacagcaacactgtactcatattcataaaataaataaatcttttttaaaaaacccaaaaaaaaaaa

SEQ ID NO: 100 - DNA, 159 bp, Mus musculus; identical to SEQ ID NO: 16

SEQ ID NO: 101 - DNA, 286 bp, Mus musculus
  misc_feature (1)...(286): n = A,T,C or G
aggtgtctcggaacaaggtttctctgtgtagttctggctgtcctagaactcagagatccacctacctctgattcaaaggactaggattaaatgcccggttaaagaagatactccagggctggagagatggctcagtggttcagatcacagactgntngtccagaggncctgagttcaattnccancaaccncnagggggnttacaacaccttttntgggggggctnaagaccgnnaccgnggattnntggncctttaatggattaattaattggtaaaaaaaaaaa

SEQ ID NO: 102 - DNA, 390 bp, Mus musculus
ggaaaacgtggaggaagctgtctattcgtcccagataggacatctgggacaggtctaagtcatggttccactcgagtccaaccttggaaaccaatgagtttactggttattactggagcacaggatgatgataataatcctgattcaacttgagtgacctagtctaaggaggtaactgatgttgatggaggtgtgtgagccttttcttttctttctttttttttggtttttcgagacagggtttctctatgtagccctggctgtcctggaactcactttgtagaccaggctggcctcgaagtcagaaatctcctgcctctgcctcccaagtactgggattaaaggcttgggcccacaatggccgggtttttaatctttttggcttacaga

SEQ ID NO: 103 - DNA, 312 bp, Mus musculus
cctgaggtggggtctttcaacccgatcacaccaccgactgcaggagaaaactgctttccagacttggcaccatccaccctgaccatcctgtggtttcactccagagctccaagagtaaatcgagggctggtgagatggctcagtgggtaagagcacccgactgctcttccgaaggtctggagttcaaatcccagcaaccacatggtggctcacaaccatctgtaacaagatctgacgccctcttctggagtgtctgaagacagctacagtgtacttacatataataaataaataaatctttaaaaaaaaaaa

SEQ ID NO: 104 - DNA, 255 bp, Mus musculus
  misc_feature (1)...(255): n = A,T,C or G
gagaagctttgatggagcacgccgaggccacacttgggngaagatgttgttaaagtctccacctctgggctggtgagatggctcagtgggtaggagcacccgactgctcttccgaaggtctanagttcaaatcccancaaccacatggnggntcacaaccatccgtaacaagatctgactccctcttctggngtgtctgaagacagctacagtgtacttacatataataaataaataaatctttaaaaaaaaaaa

SEQ ID NO: 105 - DNA, 453 bp, Mus musculus
  misc_feature (1)...(453): n = A,T,C or G
tctagtctttgaaggacaacagggtagcaactgactttcttgaagatggatacgtgcccagaaacaggcatgtgccctgcctttgctctgagggagaagtattgctgtctgaagtttactggcagacaggaaggcantcacatcgntagccatcctacctccaacaaacaccaacaaataagncaatataaacactaacctcaacgaacatctctaccatagtcaggaaaactcaggtggtcaggcttggtggcaagcgcctacacccggcgagccgtntcgcaaacacttacactggggacattgacttcaagctaagcattttcaactcctaanaaccaaagcaggctgaaagccgagatgaccccaggggccaagtcaccccaagaaaaaaggctggccttcgggctttctggnctgggccngactgngccatggtccctcccaacacaa

SEQ ID NO: 106 - DNA, 283 bp, Mus musculus
  misc_feature (1)...(283): n = A,T,C or G
cctgatcctgggctcctgncatttgnggaggactcttactnatgngcatatgangntatgagganggagcccctgtgatgnnggatattgtgccttccagaataggaagcatnctggagnctccctctatcatgtcaggacacagttganacagtagctctntgtaatcctggaagagcccctaccagntgcaacacagggtgtcaccttgatcttgggctccccagcctccagaaccgtgaggaataaatgtgacttgagcggctggctattaaaaaaaaaa

SEQ ID NO: 107 - DNA, 219 bp, Mus musculus
  misc_feature (1)...(219): n = A,T,C or G
gtcctgcatgcatgcctcanacgggagcatnatatcctctggaactagagnngcnnangattgctaacttctctgtggggctaggcctcngacccaggtcctctggaagagcatcacgngctcttacggcttcctcatcactcctgtcctgtntaatattnctgtacaaaaccaatttttattcctaggaattttttttttaaaccaatagttaaacca

SEQ ID NO: 108 - DNA, 254 bp, Mus musculus
attttcttgagtggctgcggctttgacatggggcatcatggaagcaagaggcatcagaagaaataacatgagctgccatgtgggtacacctctatgccagaagagggcatcagatcccattacagatggctgtgagatgccatgtggttactggaaattgaacacagaacctctggaagaacagacaatgctcttaaccactgagccatctctccagtgcccatgatacattttcttgatagtggatagaaggt

SEQ ID NO: 109 - DNA, 479 bp, Mus musculus
  misc_feature (1)...(479): n = A,T,C or G
gttttgctccatagtgtactacatgcaatgcgatacccaaggatgccagaagagagcactggatcccctggaaactggagtcagagtctgttgtcagccaccatgtgggtgctggaaattgaaccttggtcctctggaagagcatccagggctgctaaccactgagctacctctccaggctctttttattgtttttgaattagaatctgatgttgaaatattagatccaatgcaggaagaatctggaagaagatggaatctggttgaaagaacatctgatcttattttctatcaacctgaacgtacgatatttttctacatcaaatagaaaagaaaaatctcaaaaatttgcaggtactggttaaatgaacaagatggcagaggttgagacatggatgctgcttaagagctgtgctgaatcccccacgggtctgcagatgctgaaactccatgaggtnggactgaacagctattccagg

SEQ ID NO: 110 - DNA, 436 bp, Mus musculus
gtctatatctgtcccagaagatctccactcagaggacagacaccatccaggatcagtgatgtggccagcaaactgctcctgtggtggtctacaccacgccagctccaggtggtcctgaagaatccacaaacccaatgttagcatttagtctaagctccgccccacagttacctggcaacagccaggtgtgccagactctctataaaaggggctgcttgcttcctctgctctctcttgctcttgccttcttacttccgctctgctctgtcctctcattccttcccctccccacctccctccatgtgtttatggctggcatctacttctctactctctccctcttcctctctttcccccctctctttctctctgactttctctgcctctacttaccctcttaactcccttccatgccctgaataactctattctatgc

SEQ ID NO: 111 - DNA, 319 bp, Mus musculus
  misc_feature (1)...(319): n = A,T,C or G
actgaggctggcgaggaggctcancggttaagaacactgactgctcaaatcccagcaaccacatggtggctcgcaaccatctgtaatgggatctgacgccctcttctggtgtgtctgaagacagctacagtgtacctatttataataataaataaatctttggctggagcagacagggtctgagcgagcggaattgatcggagcgagcagaggtcctaaaattcaattcccaacagccaaatgaagggtcacaaccatctgtacagctacagtgtactcacatacataaaataaatagataaatctttaaaaaaaaaaa

SEQ ID NO: 112 - DNA, 415 bp, Mus musculus
gaactgagagcaaacaaaactgccatctgggagatcccatgatgagtatggtcactctgaaacacaggagctcagtcctcttccgatcagctatgcgacctctcagtgtgcatgtggcatgcattcatccatccatgtaaatgggtgtggcaccgggggacgatgggaaacacctataaccttggcactccggaggcaacaggaggaagatcaagaattcaaatctagggctggtgagatggctcagtgggtaagagcacccgactgctcttccgaaggtctgaagttcaaatcccagcaaccacatggtggctcacaaccatctgtaacaagatctgacaccctcttctggagtgtctgaagacagctacagtgtacttacatataataaataaataaatcttaaaaaaaaaaa

SEQ ID NO: 113 - DNA, 263 bp, Mus musculus
aagaacttctcatggtgttatgcctgcttctggctgcttccgctgactcatgctgattcagcagagccttgctgtttctgctggatcgtcctgcagcttccgattcatgtttggtgtttgctattgacctgcactgctggtaccctgactactctactaagagagacttctaaacaggtccccagctccctttttctattaaccttatcccccacccccaccccccactccccaccttctggttgatgggttaggggagaggt

SEQ ID NO: 114 - DNA, 360 bp, Mus musculus
  misc_feature (1)...(360): n = A,T,C or G
gactgagggtttgtgagttgattgaaggccctgtacccttgaaaccagtgtnctgagtgggagacatcatgctgtcacagccagcaggaagctcttcanggggatggatggactggatccanaaataaaaatggtggacagagagatgcttgggccaccagctgatggcagatgccagtactatgagatgaccaccaagaacagcagcagcagtgaagtacaggcagctggagcctagaagacaagatgtgtgctacaaagggcatggctggagaagtgacccaagcccttggaggagcccagaagatngtgagttggatcccagatattggacagttggagtttaattattggaccgct

SEQ ID NO: 115 - DNA, 232 bp, Mus musculus
  misc_feature (1)...(232): n = A,T,C or G
gtccaccaagaaagctacaaanaaggatctggcctaggcacgtgaaggctgaggcccatcctcantccacatggtgcggggatatgaggctgattctgattgcccacagcatctgactatgatttgcctcngtgctctagcaccaggtgtggttttgccagctgcagctagtttctgcaatagttgtgacatttggaattctgggaacttttcagacagtatataaatacta

SEQ ID NO: 116 - DNA, 175 bp, Mus musculus
  misc_feature (1)...(175): n = A,T,C or G
ctgagagacccaagantgcaccacctttcctggagctgaagttacagaaggttatgagctactactgtgttggttctggaaacaagacctagggtcctctgcaaaagcagcagaatactttttgctgaggcatctctccagcccctcaacttcattcttttcactcccccccccc

SEQ ID NO: 117 - DNA, 331 bp, Mus musculus
  misc_feature (1)...(331): n = A,T,C or G
aaccctaacagactccagtggacctgtcagttgtggcctctccaacatgaaagcccaggagacaccgccttcttatccagctgctcaggactccaaaaggaactgctccagcaagagaaagggggggggtgctggagagatggatggctcagcagttaanaatgccaactgcttttccgaaggtcgtgagttcaaatcccagcaactacatgatggctcacaaccatctgtaatgagatccgatgccctcttctgggatgtctgaanacagctacagtgtacttacatgtaataaataaatatttaagagagagagagagagagagaggga

SEQ ID NO: 118 - DNA, 182 bp, Mus musculus
  misc_feature (1)...(182): n = A,T,C or G
gctacctgttgttggagcaggagaactctctctcagatgcctctccagtgccatgtctgtctgagttccgccgtgcttcctacctactacatctctgaacctgtaagccagcccccattaaatgttttcctctatgaganannncntggatangatgtctactcacagcaataaaaccctag

SEQ ID NO: 119 - DNA, 393 bp, Mus musculus
  misc_feature (1)...(393): n = A,T,C or G
tatgatggtgtcttcagacacatcagaanaggactcgggatctcattacaaatggtttggagccaccatatggttgctgggatttgaactcaggaccttttgaagaacagtcagtgctcttatccactgaaaccatctcaccagcacctcccttggtttttcaagagagggtttctctgtgtaaccctggctgccctgggactcactctgtaaacnaggctggcctcgaactcanaaatctgcttgcttctgtctcctttgagcactaggattaaaggctgtgccaccaccggtggacttgactgcctctacttgtgaggtcctattttctagccatcttctatccactgtanaattggaaggataataataaagcttcatggccacacacca

SEQ ID NO: 120 - DNA, 286 bp, Mus musculus
  misc_feature (1)...(286): n = A,T,C or G
gacaataattgaccttatccagacatccatatnnagccaantatagtttggggagtcaactaccatgcttaacaggggacactcagggagtgttggancaggtgtgccactgtgggcttgggctttgataccctagtcctagctgcctggaagtcagtattctcctagctgccttcanatgaanatgtaaaactttcagctcctcctgcaccatccctgcctggatactgccatgttcccaccttgatnataatggactgaacctctgaacctgtaagccagcccc

SEQ ID NO: 121 - DNA, 324 bp, Mus musculus
  misc_feature (1)...(324): n = A,T,C or G
cacacagactggataggcagntngccaccagtttncctgataccatccggagtcactggacaatgcttncaacatgggagacaaagtaaatttgtttaccactcactactccagacgatggccatggccatgagatctcacgagttaagaatgctggctgttgtgaccaggtgtgatggcccccacctttaatcccagcatgcaggaggcagaggcaggtggggaccctgtgagntcagtgccagcctggtctacaaagtgagttccaggactcccaggactgttacacagagaaaccctgtattaaaaaatcaaaagcactgg

SEQ ID NO: 122 - DNA, 100 bp, Mus musculus
  misc_feature (1)...(100): n = A,T,C or G
aaattcagggttagaccctccaggatacacagctgatctccagcnantgggcgatttctagtgaaagaaataaaatgagtgcttaactcaaaaaaaaaaa

SEQ ID NO: 123 - DNA, 100 bp, Mus musculus
  misc_feature (1)...(100): n = A,T,C or G
atatggttgatggtanacagncacctganaactccagctccagggggatctgacattacacacgtgtaaaaataaattgaatctaaaatttaaaaaaaag

SEQ ID NO: 124 - DNA, 330 bp, Mus musculus
  misc_feature (1)...(330): n = A,T,C or G
cctcctcccccttgttacctcctacaaaacaagaagacaaaggaaaagaagaagaagaggaggaggaggaggaggagaaggagaaaggagaggagaaggaagaagaggaggggaggaggaagaggaagaagaggaagaggaggaggagaaggaggaagaggagaaaaagcataccaagtcaatctgtgttgcccatactgnagcatggtcatactcccagaggccncttaaagaaaagtttcccacctgcacccctgccagaagccataaactgtgaagttacacttcagcatccttattacaattattaanagttcttttcaatatctt

SEQ ID NO: 125 - DNA, 246 bp, Mus musculus
ggccttgtttggaagagatgatcaataactacaatgagctaagcagaagtttaagatcaatgtactggggctggtgagatagctcagtgggtaagagcacccgactgctcttgctaaggtccggagttcaaatcccagcaagcacatggtggctcacaaccatccgtaacaagatctgactccctcttctggagtgtctgaagacagctacagcgtacttacatataataaataaataaataaaaa

SEQ ID NO: 126 - DNA, 276 bp, Mus musculus
gagagaaacgcacaaagaacttctcatggtgttatgcctgcttctggctgcttccgctgactcatgctgattcagcagagccttgctgtttctgctggatcgtcctgcagcttccgattcatgtttggtgtttgctattgacctgcactgctggtaccctgactactctactaagagagacttctaaacaggtccccagctccctttttctattaaccttatcccccacccccaccccccactccccaccttctggttgatgggttaggggagagg

SEQ ID NO: 127 - DNA, 173 bp, Mus musculus
  misc_feature (1)...(173): n = A,T,C or G
gcatacatacgcacattnccaatcaaagcatcagaaccgcccctgacacccaggttctctgcaagagcaacaaatgtgctttcttgccgagccagctntncaacccctcctatctgtcttttcaggagccaatgtgcctttttttaaataaataatttctattaaaaaaaaaa

SEQ ID NO: 128 - DNA, 166 bp, Mus musculus
ccagcacacacatgatggctcacaactattggaaactccagttctagaggatcctgacaccactttgtgatttatgtgggcaccacacatgctgtgtagatacagacaagcaggctcacacacataaagtcaaataaatatttttttaaaaagtcaaaaaaaaaaa

SEQ ID NO: 129 - DNA, 262 bp, Mus musculus
  misc_feature (1)...(262): n = A,T,C or G
gacagagagagagagagagagagagagagagagagagagagaganagagnacgntttattaatcagnggagngaaaacactggagaagaggaccttaagcatacatacgcacattcccaatcaaagcatcagaaccgccccngacacccaggttctctgcaagagcaacaaatgttctttcttgccgagccagctctccaacccctcctatctgtcttttcaggagccaatgtgcctttctttaaataaataatttctatta

SEQ ID NO: 130 - DNA, 307 bp, Mus musculus
  misc_feature (1)...(307): n = A,T,C or G
aacctgggaattacaggatggactgtatccctgtcctgggaatggctactgggnaactgnaatggaagncactaaaaccactgnagccgtccctccagtaccagtgnattaacactagctgctcttccggngggaccaagtatttgnattcccagcacacacatggatggcctacaaccttccatcaactccggttccagggnatcgcacaccttcttcttttagcctccatgtgcactgcattcacgtggtacacagccatatatacaggcaaaataaaatgctcatacacacaaaaaataataaa

SEQ ID NO: 131 - DNA, 190 bp, Mus musculus
  misc_feature (1)...(190): n = A,T,C or G
aaaggctcatggttaaaaacaccaactgctcttctgtaagttccggganttcaaatcccacaaccatatgggngggctcacaaccatccataacggaaatctggatgcctttttctgggagtatctggagggacagctacagtggtacttacatataataaataaatttttttcttcttaaaaaaaaaaa

SEQ ID NO: 132 - DNA, 284 bp, Mus musculus; identical to SEQ ID NO: 15

SEQ ID NO: 133 - DNA, 197 bp, Mus musculus
  misc_feature (1)...(197): n = A,T,C or G
gacccgaccgactgacaccncccctgctgtactttgttggtcatgagtgagtttcttgttccaatgctgtgtggaatagcaagctggcctgacttcagatccctgcactgagagcatgccttgacttccctcactgacttaccttgacctggaattgtgagccaaaataaaccctttcctcccctgaaaaaaaaaaa

SEQ ID NO: 134 - DNA, 196 bp, Mus musculus
  misc_feature (1)...(196): n = A,T,C or G
gcatactgatggacctgggacgcacacacggacncctttnnactggaccnaaganttncagggggaatcgggtcccctngcccttccttcatgactaattgtcacaacaanaangagcanagcctngntncctgaactgcgtacaagaacatgtaacccctcaataaaattgcntnntgaaatggaaaaaaaaaaa

SEQ ID NO: 135 - DNA, 100 bp, Mus musculus
  misc_feature (1)...(100): n = A,T,C or G
acttgaaattgctccttanccttttgaagcatccngcggaacccatgnccnngnncacnangtggacacgtctcgcccaacatatgtaacatttgcccct

SEQ ID NO: 136 - DNA, 139 bp, Mus musculus
gactgagctgtctgaagaagtcagaaaagggcttcagaacccctggaattacaacgaggatgaattgcccaacatgggtgctcggacctcagatcctctgcaagagcagtaaatgtttttaaacgctgaaaaaaaaaaa

SEQ ID NO: 137 - DNA, 289 bp, Mus musculus
  misc_feature (1)...(289): n = A,T,C or G
actgagatgaaaactgaggnataaagttacttgngttcntggacaagctaaaagggagaaggncagcccaggaanaggacatgtttggaggaaggattcctanncattgntttaaaagggaaccananatggctcaacagttaagagcaccgattgntcttccaaaggtcctgagttcaaatccnagcttccacatggtgggtcacaaccatctgtaatgagatctgatgccctcctctggtgtgtctgaagacagctacagtgtacttanatataataataaataaat

SEQ ID NO: 138 - DNA, 354 bp, Mus musculus
  misc_feature (1)...(354): n = A,T,C or G
ccctgtggtggcaaagaagacggtgcctgagaagcacaacatgaggctgggcagctgcgcacctattaacaatgctcgccgcgcaagcatgagggcctacctgagttcggatccccattacccatgtgaagtgctgggcctgggatgggaaagagatggacagattgcccngagctctggncagctnnggccagacaactggtgagctctgggttttactgaagaagatccaaagaagatattcaacttcccttttnccatgcncatatatgcacaccttnccaccccttcatcttattcaccaaaagttccattantaaaaatttaaantaaaaatggataaaaagctcaaaa

SEQ ID NO: 139 - DNA, 348 bp, Mus musculus
  misc_feature (1)...(348): n = A,T,C or G
gggggggggggggggggggggggggggggggggttnnttnnnngggggggggggcgnngggngggggntnccatttcaaggcnttggcnccaaagcngaagcctgggagaaggtctacatcttcattccaaangcttgctagtggaagactgacttncangccactgangcacnggntacnccgttnntatgtngacctagctggcttgaactnacaaacatncnctgctctgctccgaatgctgggatanagaattactttntcatctacanactgacattgnatccnccttggaggcnaggtaaaggttntggattagctttacagactgcttaaaaacaacaaaa

SEQ ID NO: 140 - DNA, 302 bp, Mus musculus
  misc_feature (1)...(302): n = A,T,C or G
ctggagagaggctcagcagttaanaccactgactgctcttccaaaggtcctgagttcaaatcccagaaaccacatggtggctcacaaccatccataacaagatctgacgccctcttctggtgtgtctgaanacagctacagtttacttatttataataataaaaaatctttgggctggagcaagcggagctgactggagcgagtggggcctaaattttaaaaaaatttttttncttttttcagtacttcaaaatgccacctttgtagctgtattttggaaantgcccaactggctgacattt

SEQ ID NO: 141 - DNA, 248 bp, Mus musculus
  misc_feature (1)...(248): n = A,T,C or G
ttggccattcacagctagccactgttggattagcnggtctggaacctctacatcattccaataaattccatagatagatagatagatacgatagatagatatatacgatagacagacaggctgacagataagcgggagaaagagacttcataagtctatgactctagagaagctgacagagagagagatttcataagttctgtgactctagacaacctgactaataaangaccttttaccagatgcta

SEQ ID NO: 142 - DNA, 100 bp, Mus musculus
  misc_feature (1)...(100): n = A,T,C or G
ggaactgttctggggtacatacngatttntttctgtngactgatcattaaacaaatcaatatttgcttaaatntgttatnccatattttcaataaacctg

SEQ ID NO: 143 - DNA, 271 bp, Mus musculus
aaggtttctctgtgtagttctggctgtcctagaactcagagatccacctacctctgattcaaaggactaggattaaatgcccggttaaagaagatactccagggctggagagatggctcagtggttcagatcacagactgctcgtccagaggtcctgagttcaattcccagcaaccacaaggtggctcacaacacctcttctggtgtgtctaaagacagcaacagtgtattcatgtacattaaatgaataaataaattgtaaaaaaaaaaa

SEQ ID NO: 144 - DNA, 176 bp, Mus musculus
  misc_feature (1)...(176): n = A,T,C or G
tggatagatgctggtcattgaggactaacaggncanttgtatgtgacctgaggagcctcacagggagcacctttctactggaccagagattattcggcgggaatcgggtcccctcccccttccttcataactagtgtcgcaacaataaaatttgagccttgatcagaaaaaaaaaa

SEQ ID NO: 145 - DNA, 258 bp, Mus musculus
  misc_feature (1)...(258): n = A,T,C or G
gcctaaagaaggcgctggacccccaagaacnggaattaagagctgaggtgaaccnccatgtaggtggaagaacngcngaaagaaacgcaccaangaacttctggtgttattccagctgcttcttgtcacctcttcggactaacgccaactgatngagcctcgaggnttcttctggatcaagctgctcttactgcttcgtgtttggtgtttgtcgaatggactggactgctgctgctgattcatgtttggtgttttgct

SEQ ID NO: 146 - DNA, 223 bp, Mus musculus
  misc_feature (1)...(223): n = A,T,C or G
atagcacgaagaggaggaggaagaagaagaggaggaggaggaggaggaggaggaggaggaggcgtcngctgcggcggcngctgtcactagntactccctttggaaagttttgggaagtccatgaagacganttagcctgancataanatttgnngagattttnagcatantctcaaaaatgntgnantattntgnccaataactaccattttggctattctta

SEQ ID NO: 147 - DNA, 100 bp, Mus musculus
aagcactggctgacctgggaacttgttatgtagactaggctggtttataacccaaggagatctttccttgaccaccgcccttagaggaattgaaagtttt

SEQ ID NO: 148 - DNA, 100 bp, Mus musculus
  misc_feature (1)...(100): n = A,T,C or G
gtcctccaatgacaccngggccaaaangatgannacttanttaaaaaactntcaccnctcanccnggaagggtggctgcttccatataaaaaccaaaaaa

SEQ ID NO: 149 - DNA, 100 bp, Mus musculus
  misc_feature (1)...(100): n = A,T,C or G
ggagcagcccccccaggacactggnggnngggntccacagggtaganganggtcggangggtctgaatcacctccaagtgactctgcatagaaaaaaaaa

SEQ ID NO: 150 - DNA, 100 bp, Mus musculus
  misc_feature (1)...(100): n = A,T,C or G
gtctcctgacacgagctaaagtcattctgaaaggaaggaacctcataanatgaacaatgtgatatggaagtataaganaaataaaccatctcttgctcaa

SEQ ID NO: 151 - DNA, 455 bp, Mus musculus
  misc_feature (1)...(455): n = A,T,C or G
gactgagataacatttgatggtcgcctctaagccgaagttctttgngaccgcctaagatcaganagcaaccacgagcttcccaccttgtactggccctgggctagttacaaaaatgaagagactgctcctcctgaagccagaagcataagccaggagggtgtgctgctgctgctgctgctgctgctgctgctgctgctgctgctgctgctgctgctgctgctgcaaacctanaccaggatgtgggaggggaccctaggcatatgatacatatttgctgaggagaagggactgagaaagaatcaagnctaagatgtcacagtancatactggantccttnagatgttgcttcaggccanaaaccacaaaagaagccactagtgnctgttataaagaatgaggggctggccagatgatagtagcacatgcctctaatnccagtacttaggaggcaga

SEQ ID NO: 152 - DNA, 327 bp, Mus musculus
tgaggaaagaactggagcaactgcgattactatgccagtaaagagcaaaacaagccaggggcggtgcccatctttaatcccagaattctgaaagtagaggtaggagatctctctgagttcgaggccagcctgagttctggggcagccaagattcagcagagagcaaagacaaagaaagaccttgtcgagaaagagagagaagagaggaggaaagaaagaagaaaaagaagaaaccaggagggaggaagcaacaacctatacagtcaatggaggattgaactttttttttaaatatataaaactgttgcatcaagtgaaaaaaaaaaa

SEQ ID NO: 153 - DNA, 258 bp, Mus musculus
  misc_feature (1)...(258): n = A,T,C or G
gactgaggaccttcctaagaaagggggtatgatgatctgncaagtggaatgcanagcgccccattaagaatgagcaccccgggctggagagatggctcaaaggttaanagcaccggctgctcttctgaaggtcctgagttcaattcccagcaaccacatggtggctcacaaccatctgtaatgggatctgatgccctcttctggtgtgtctgaagacagtgatggtgtactnatatacacnaaagaaagaaagaaaaa

SEQ ID NO: 154 - DNA, 263 bp, Mus musculus
  misc_feature (1)...(263): n = A,T,C or G
actcactcttattcaccngcntgctnttacttgccaggacannngttggaacctanttactcaggattccagcctctacagaagaccagctgaaacaactagcctcgtgggactgagcaactactagattcttggacttcccgtccacagctgcccattggtngnggaagtttgtcctgncagcacatctgatggaacatcttgnngnnaanatgnttcgtggngacatttacatntacatgtatangtttagtctcattaca

SEQ ID NO: 155 - DNA, 437 bp, Mus musculus
  misc_feature (1)...(437): n = A,T,C or G
agagagtggctggagctaaaggcaagaaagtcaaaagagaagccgagttagggctggtggcagntgatcccagagctaagtggagtggaacaaaagagatgttgggaggggctgttatcgtggcctcggaaaggcggtagcattttaaaactacatgcaacagggagtggcacttttagaagatgtgttcctgttggagtggttgtgaccttattggaggaagtgtgtcactatggaggcagactttaagaccctcatcctagctgcctggaagtcagtattttgctagcagccttcagatgaagatgtagaactctcagctcctcctgtaccatgtctgcctgcacattgtcatgctcccaccttgatcatactggactgaacctctcaacctgtaagccagccccaataaaatgttgtctttgtaaaaaaaaaaa

SEQ ID NO: 156 - DNA, 173 bp, Mus musculus
  misc_feature (1)...(173): n = A,T,C or G
tgtcttcctaggctatcangaatgtttttaggaagcccattcaancggagcagtgatggtgcgtgcgtgcttttaatcccagcacttgggatgcanaggcnggcagaattctgagcctggtctacagagagagttccaggacagccagggctatgcagagaaaccctgtctca

SEQ ID NO: 157 - DNA, 307 bp, Mus musculus
  misc_feature (1)...(307): n = A,T,C or G
gaactgagagcctattgagtctggctagcactgcctgcntgcacatgactgtggagccatccactggagcctgggtaaccgtaacaatagacacactcctaaagaaaaangactctcctgctcatcaattgaacttgtggattgccaatagttcctcggctgtgggaaagcctcgtgaactcctctcccctccaggctggaatgttgactgacttgatctcatgcaggtcttgtgctggtaagcacagctgttgtgagctcatgagtgccatagccatgccatgcccataaaagcatttcacagcac

SEQ ID NO: 158 - DNA, 220 bp, Mus musculus
  misc_feature (1)...(220): n = A,T,C or G
ctcaagaggtcattggatccccttggaagtnataagaaagntgtgagccaccagatgtgcactgggaacttgaatcaagttctctggaagagcaaccagaaacagggagagagactggaagaggaagggggggggccgtggatggagtggganaagnacagtgcctacctggnngtctgnncttntngnnggatggaatgaaaatatatcttggtcactg

SEQ ID NO: 159 - DNA, 243 bp, Mus musculus
  misc_feature (1)...(243): n = A,T,C or G
aatgcaccctcctgaatgaagacattctaaagggacatttgtgacccctctctttgcctgccaaactactgaaataatgaacgtcaagaaattacgggccaggtgtggnggtgtacgcctttaatcccagcactcgggaggcagagacaggccngatttccgagttcgaggtcatcctggtctacaaagtgagttccaggacagccaggggtatacagagaaaccctgtctcaaaaaaaaaaa

SEQ ID NO: 160 - DNA, 180 bp, Mus musculus
  misc_feature (1)...(180): n = A,T,C or G
agctgctgagtcgtatttggtgtttgctnagggactgaactgctgncaaagaagatcgagctggcccccaaagaactgctgctgaacaggatcactacatgtctaagcatctggacacccctctgatgccacagtctgactctggggaccatgtgggggggggaggaggcgggggggggg

SEQ ID NO: 161 - DNA, 100 bp, Mus musculus
  misc_feature (1)...(100): n = A,T,C or G
tgcgatcacctttggcgtggggncagcgtgactcagacaaggacttttggcttctnagatggcttcctctgtggtgctnctcnggagcccactttctccc

SEQ ID NO: 162 - DNA, 258 bp, Mus musculus
  misc_feature (1)...(258): n = A,T,C or G
gttgttaagttcaacttgtggtcctgcctccnttgatagaaacccgctgnagaagaacctcttgtgaggtctcctgcagcagcttgcagattccctggcctcgccacaggccanttggtgagcctggtggttccttcaggattgaactacagctgctggtttgtgcctggtgtctgcctgctgacttttcttttccactgcttctgctggatggtgggcaagaggacaggttgaccccttattaaaagtaggttgcaa

SEQ ID NO: 163 - DNA, 163 bp, Mus musculus
atcagccctgggggacaaaccagtaagcagctgccctccatggcctctgcatcagttcctgccttcaggttcctgacctgagtttctgccctgatttctttccatgatggagtctgacacaggagcgtaagcaaaataaactctttcctcaccaaaaaaaaaa

SEQ ID NO: 164 - DNA, 253 bp, Mus musculus
actgagtaatgccagatgtaatctcaccaacatgactgcccaagaaatgaacaaggatgacatcggtggacatggcaaagtgggaagagaagagagcattaggcctccactccacataaagaactacagaaggaagccttgtgaaagaacattctgcactccacccatcattcacagtaagtttacagtttttgtacataggctcccacaattataatctcaaaaataaattacaaaaagaaatacaaaaaaa

SEQ ID NO: 165 - DNA, 288 bp, Mus musculus
actgaggtgtgggaagtgaagcttcttcgtttctccagagctgctaactatgatcgcctatgttctgggagagacatgatttttgacagcttcagatcattcagatctgggaactctggagaaggagtaaataccagaatccagagagggtccagaattgctcagaagataaagaggaggagaagaaggagaaggagaaggagaagaagaagaagaagaagaagaagaagaagaagaagaagaagaagaagaagaagaagaagaagaagaagaagaagaagaaaaaaa

SEQ ID NO: 166 - DNA, 347 bp, Mus musculus
tgagtgtccttggaagaagaagagggtgtcggatcttctggaaccggagttgcaaacttgttagctgtcatgtaagttctgagagccaaatccaggccctctgtctcagcagcacgcgctttactctgtgagcgtctctctggcaccgtagtgattttaagactacttacgaggactgggcaaggtggcgcacacctataatcccagcactcaagaggcagaggcaggcagatttctgagttcaaagctagcttggtctacatggccagttccaagccagtcagtgctataaacaggaagaccttgtctcaaaaatctaaaatagaataaaataaaatactaccttt

SEQ ID NO: 167 - DNA, 270 bp, Mus musculus
ggtagaccaggctggcctcgaactcagaaatccacctgtctctgcctcccgagtgctgggattaaaggcgtgcgccaccacacccagctgtattaacatttcttactaccctccccgttttctgtctccatctctctttctgctctcaccttctttctcccctgcctgtctctcgacttgtgctgaagtctgtggaaactttccctcagtaaactccaactttgctcctaaaagtcaaataaaaatcctcttatcactcaaaaaaaaaaa

SEQ ID NO: 168 - DNA, 170 bp, Mus musculus
  misc_feature (1)...(170): n = A,T,C or G
ttcttgcctggtggcagcttgccacatttgaagcaaactccacaaggatgntcttcaatgttcattatcttctttgaaattgtatgggggtacctgccagaatgtgacatgtctcattgtcaaaaaagtcttaagctaataaaacatctttaaatgcctaaaaaaaaaaa

SEQ ID NO: 169 - DNA, 471 bp, Mus musculus
  misc_feature (1)...(471): n = A,T,C or G
gactgaggaacctcgnctcatgctatacaggggtctgtgggtttgatgcananaagaatttcaagatgagccagcatgaagcagantcagagacgaaaacaaacaaatagacgacancaacaacaacaacttcagagtctcaccgcgtggtcgtcctggttagcctggaactcgagagatagaccaggctgccttgaaccacagagataaatacccctgcctgtgcctccagagcactaagattaaaggtattcacccggacacccagcccacagatggagattttattaaagataatttaaggggctggagagatggctcagtggttaagagcactgactgctcttctgatgtcctgagtttgattcccagcaatcgcatggtggctcacaaccatctgcaataggatcttttggcatgcaggcatatatgcagatctcaatctgcactcatcatgtataaaataaaaaa

SEQ ID NO: 170 - DNA, 265 bp, Mus musculus
  misc_feature (1)...(265): n = A,T,C or G
actgagcctcttgcaagaaaggnaccaggcctgctggggagcacagcacaaaggcccttgngctcacagatcgccaggaaaaccatgaatggtgctggagagatggctcagtggttaagagtgctggctgttcttcaaaaggacctgggttcgatttccatcacccacatggcagcttaccaccatctgtaactccagctccaggagttctgacaccttcacatagatgcatatgcaggcaaaacacaaatgaaaataaaataaa

SEQ ID NO: 171 - DNA, 377 bp, Mus musculus
  misc_feature (1)...(377): n = A,T,C or G
gactgagaatgagcatgtgaatgcagtaancgtgggagacagaaggcngtgacttcctggagctggagttacagacagttgtgaatagcctcatgngagtcctgagaactgaacttgggtcctctggcanagcagcacatgctcttaactgctgagccatctttccagccatcttgagtcagaagtccaacgctacggctttatagaggagcagagccatcgcacacaaggggcagggaatcgcaatgatttgatcaatcagggacttcgaggcaataagagaagagtgggctctctcctctctgcctctgttaccctcttaactcccctccccatgccctgaataaactctattctatactatataaaaaaataaa

SEQ ID NO: 172 - DNA, 271 bp, Mus musculus
gactgagaggtgtttgtctgcatgtggtcggtacactacttgcatacctggtgcccacacaggccagaagagagcattggagctccctggaactggagttacagacagttgtgaagctgctatctgggagctgggcattgaagcctgattccctggcagaccgctaagccgactctccagcccaacatatatatttaaaatcacatttgaagcacatattctactacttctgcatgatttaaaaagtaaatatttaggaaaaatgaaaaaa

SEQ ID NO: 173 - DNA, 239 bp, Mus musculus
  misc_feature (1)...(239): n = A,T,C or G
ggcctgctgggagcacagnacaaaggcccttgtgctcacatatcgccaggaaanggnngaatggngctggagagatggctcantggttaagagtgctggctgttcttcaaaaggacctgggttcgatttccatcacccacatggcaagccttaccaccatctgtaactccagctccaggagttctgacaccttcacatagatgcatatgcnggngaaacacaaatgaaaataaaataaa

SEQ ID NO: 174 - DNA, 223 bp, Mus musculus
  misc_feature (1)...(223): n = A,T,C or G
gactgagatgattgatgtggnaggncccaaccactgtgagctgtggcntctntangcnaatggacccacagtgantaagaaggcaaaggtgaccnaaccaaaaggagcaaggnannnagcancgctcctncacagnctntgcttnanntcctgcctccaggttcctgtcttgaactcctgccctgacttccctccatatggactacaacttaaactgaaataa

SEQ ID NO: 175 - DNA, 249 bp, Mus musculus
  misc_feature (1)...(249): n = A,T,C or G
cctggaacgtcactctgcagagcatgctggccttgaanncacaanagatangggnctngctgtgcctnccaagacacagggnttctatgtgtactcctggntgtcctggaactcactctgtagaccaggctggcctcgaactcagaaatctgcccgcctctgcctnccaaatgctgngattaaaggcagcgggccaccactgaccggnngnccctcactttcttattccaatccctggcaaccaacctt

SEQ ID NO: 176 - DNA, 404 bp, Mus musculus
  misc_feature (1)...(404): n = A,T,C or G
gaactgaggagttgagnaggtggaaccctgcngaacccngtgggggtaattcccacctacatggaatggaaggagttccctggngnntggtggnnccctggctcctgannaagttactnnccccacagtcccccacaggagaagcatgtcccaagcttctgacctcctagacgcctcccagttacctagcaacagcgagatacaagcccactataagaggggctgcttggccccacctgggtgtntcctcatcctctctctctaacctcttactctctagcctttcctctttccctctctttcccccttccctcctcttggccatggccggtctctttctttttaccttctctcctttccccttgcctttctacaataaagttctaaaaccttaaaaaaaaaaa

SEQ ID NO: 177 - DNA, 129 bp, Mus musculus
  misc_feature (1)...(129): n = A,T,C or G
ttaagaacactgactgctcttccaaaggggggtgggnnnaactcccagnaaccacatggcggcgtcacaaccatcttgtaatnanatctnacnccctcttctgntcttnagacacacatgtaaggaact

SEQ ID NO: 178 - DNA, 176 bp, Mus musculus
  misc_feature (1)...(176): n = A,T,C or G
ataccagctctgctagcctcagctgaggaagatgagcagtaacagactccacctggacctgcttcccanatgctnactgggcncatgagatctgacaccctcttctggggtgtctgaaagacagctacagtgngcttacatattaataaataantaaatcttttataaaaaaaaaa

SEQ ID NO: 179 - DNA, 229 bp, Mus musculus
  misc_feature (1)...(229): n = A,T,C or G
gaagagcttaatattnctgacgngaatgacgggtggtacacatcgatgctnggctctgatcccacccccantggacatganctgnatccggtctcnntatctacngnaaccatggcaggactgaagctccctgcgtataccatagttggcctccaactcctagagntccccctgcctctccttcccgagngctgagattaaaggcgcgcgccctgccaaagaaaaaaaa

SEQ ID NO: 180 - DNA, 139 bp, Mus musculus
  misc_feature (1)...(139): n = A,T,C or G
tgagggatgcccaaagaggccnaagagcatggtggatcctcgggtgcttacgaanccccanaggtcattgctgggagccagcctggtctacagagtgagttccaggacagccagggctataaagagaaaccctgtctcg

SEQ ID NO: 181 - DNA, 510 bp, Mus musculus
  misc_feature (1)...(510): n = A,T,C or G
actgagaaccaagttccaggattgncactaaaaagaaaaaggacaaatcaagctgagcaccagcggttcacctctctgtcccctgactgaggacaaaaacatgacatgcttcttcacacccctgcccagctagagccaatctcactgcatgccttcccagccgccacagactgtgaacccaagttaagttgcttgctcaagngttctgtaacagcagtgagaaagcagtgacaagaagaggtaaaggatagtatcattgtgtcatgtaggagctaggaatcaatagctagctctctgactttgttaactgtttggaaaatgatatttaaattcaaaggtgagggggctggtgagatgactcagtggttaagagtgccaactgctcttccgaaggtcccgagttcaaatcccagcaaccacatggtggctcacaaccatccgtaatgaaatctgatgccctcttctggagtatctgaagacagctacaagtgtatttacatataatcaatc

SEQ ID NO: 182 - DNA, 519 bp, Mus musculus
tgagctttctgttgcccggtctcttgccttgtgaaaaaccaccgcatcgtgttctcaccactttggatggagccattccaccatgtctccccagcgcgatggactgcaacctcctggaatcatgagccacacccggagatgcttaatcttcattgtcaacctgactgcattcggaatcgcctaggagacacgaatctcccttggaatctgcctgttactgccaagaatttccagagagttttactaagatggaaaggtccaccccgcgtgtgagtggcatcttcccattgcctgggactccagactcaaaggagacagtgagctgagcagcagcacccacctctttgcttcctgacttcagacgctgcatgcccaaccaccccacccttctgctgtcatccctgacccaccacgatgtactgtgcactctcagactgtgagccacagtaaacccctctgggagctgctttcctcaggcacttgatcacaacaacacagaagtacctgacagagccatta

SEQ ID NO: 183 - DNA, 391 bp, Mus musculus
  misc_feature (1)...(391): n = A,T,C or G
gactgagacagctcagtgtagaagagagaagaggagaaggagaaggagaaggagaaggagaaggagaagaagaagaagangangangangaagaagaagaagaagangaagcagcancagcagcagcagcagcncatgacagacagggaagcactgaagcatctgctgagacccagatctcctctagtcagggcacanaactgcnatttgttgtatgagggctgagagganaaacaggaggatcangaaggcttcctgggggagagggcntccgtatctggcctttaaggataagtggngggggccgttctgggaggaatgtacaacctatcctaaggcccagagacaaagaaaatgacctgtttgggtgnggcggactgaaaaaaaaaaa

SEQ ID NO: 184 - DNA, 208 bp, Mus musculus
  misc_feature (1)...(208): n = A,T,C or G
ccaagctcgtcttgaactctgaggtctgcatccgtctgcctcctgagcactgggatcaaagaatattctgttggagctcactggagtctccctgggtctaacagcaaaggatagttcaaaacggtcttgactgcccatgtaagcaggannngngaaaacagctgctcaaagacagttcgaatcctctgctaagcgtcctgaagacaaa

SEQ ID NO: 185 - DNA, 243 bp, Mus musculus
ggaagccccagctatacagcgaggctctgtggaggaggcggagagatggcacagctgttaggcatacagcctgctctctttcagagggcctgagttcagtcctccacatctgcatcagtggttcataaccaccgcctgtgactccagctcccttcttatgcctgagggaacctgcatgcctgtgacatttgtacacgtggcatgcgtgactctcccccacatagacacataaataaaaataaa

SEQ ID NO: 186 - DNA, 310 bp, Mus musculus
  misc_feature (1)...(310): n = A,T,C or G
ggcctgattcctgtgctcagctctcttgacaatctttcanaaaagggcatcagatcccattacngatggnngggagccaccgtgttgntgctgggaattgaattcaagacctctggaagagcagtcagtgctctgaaccgctgagccatctctccagctctatttatgagatctttatgtaacattaggttctttattttttaaaaaattatactgggtcatcaagacagttgtgggttaatctactaagtcttcacatgagcacacgccccattgccagtaaataaatgtcttgtttaaaaagaaaaaa

SEQ ID NO: 187 - DNA, 448 bp, Mus musculus
  misc_feature (1)...(448): n = A,T,C or G
gggcgtcttaaacttcccctttgggggggtnncatctctgtgtcctggatgggaggacaactgcagcgcaccctccgccccgcggctagagagaaaacatctctcagcacagattggatcattagctcctcctgcaaaaccacactaaacacttatgaacataaaatggttcataaaatcnnnttgtaaaataacctttcattgtatgaattatgaaatgaaggatttcaaaacttgaatcttacaggtgtctagaacagaacaccactataagtatcaaaagtttatgntgatttatttgttaaagatctaggacatgatactttatgccttctttaaatgagtatcactgggctggagagatggctcancgggtaagagcactgactgctcttccagaggtnctgagntcaattcccaggaaccacatgggggctcacaaccatag

SEQ ID NO: 188 - DNA, 236 bp, Mus musculus
  misc_feature (1)...(236): n = A,T,C or G
gccccaaccaggcagcaaacactagctggtccgaggcccctgacacatatncagaggggacttacctagnctggccacagtgggagaagacgtgcctaaccctcangagactgaggccccagggattgggaaagcctggcagggaggagagacatcctccttggagagtggggaggaggaatgggatgagggcagactgggaggagggtaacgactggattgtaaaaaaataaata

SEQ ID NO: 189 - DNA, 231 bp, Mus musculus
  misc_feature (1)...(231): n = A,T,C or G
acctggtgctgagccttaagccgnccgttgacatattgagngggggnntggagaaggattctgtataatgcatgtanantatatcctcctntgcttctggatcttgntttgctttaggtctantntgccagagtctacaatcccctntntttnataaaccaggctggnncttgactcagatgtccgctngcctctgcctcccaagtactgggattaaaggcgtgcacctac

SEQ ID NO: 190 - DNA, 198 bp, Mus musculus
gaactgagaagtctgccatggattctcgttgttaattttccatgcatgtcaaacaccaaaagtgaacaacctgtgctggatagttttatgtcaacctgacacgagctaaagtcatctgaaaggaaggaacctcataagatgaacaagtgatattggaagtataagaaaaataaaccatctcttgctcaaaaaaaaaaa

SEQ ID NO: 191 - DNA, 140 bp, Mus musculus
  misc_feature (1)...(140): n = A,T,C or G
gacggctggtcattatccttgaccagcgacagtgatngtaantangaagccacacacagngcacgntttntactngnaccactaggattatanctggccgntaatagggtnccctcccccttncttcataactggtgtca

SEQ ID NO: 192 - DNA, 150 bp, Mus musculus
cctcctgtctccatttcttgagtactgggatgtcaggcctgtgtcatcatgcttgatttacaggtcctgggatattgaacacagccctttgcacaagctgggtaagcactttttatcaacctctctctaataaaaagttttattcacgta

SEQ ID NO: 193 - DNA, 317 bp, Mus musculus
gactgagaagaatgtaaatgaggacacattgtcaagtaaactggctcgtcgcatccataactgcaggatagcttcagatgcggcagctctgagaactgcaccagtcaatatacacggcctcaggggctggagatggctcatcggtcgacaacaccttcggtgcttctagaggactcagattggattcccagcacctacggtggctcacaaccatctgtcatgtcaagtctaggggatctgatggcttcctggcttccatgggcaccagctatgcacacggtgcacatgcaggcaaaacacacacagaataaaaaaaa

SEQ ID NO: 194 - DNA, 186 bp, Mus musculus
agtgagttggctcaggtgctaagagcaccaagccaccaagcctgatgacctgcgttctggaacccacgttggagaaggagagaagaaaatcccacaagttgtattctgacctccacatgtgcaagacacacatgcgcacaaataataaataataaaatgtaattttacaaatcctaaaaaaaaaaa

SEQ ID NO: 195 - DNA, 415 bp, Mus musculus
  misc_feature (1)...(415): n = A,T,C or G
ccactgccaccgctgccaaanagagcngnactccaanaggcctgngccaccatgcctgtgnntggnnnggnatacctgccagccctgctgtcagatactaacatacatggagtgctggtttataaagcctgggtccaggaagatgggactttattcattgtatttgctagtgnggctagtattagggcagcccaagggaagacttctggtatggttnggagataaattaagaaaaataaactcttgggagctggacagatggctcancggttaagagcactggctgcttattcttccagaggtcctgagttcaattcccagcaaccacatggtggctcacaaccatctgtaataggatctgatgtcctcttctggtgtggntaagacagcgacagtgnactcgcatacttaacta

SEQ ID NO: 196 - DNA, 170 bp, Mus musculus
  misc_feature (1)...(170): n = A,T,C or G
ggagcttcctgctcatttnttctggcacgcccantgntggaacctggggagccacanacagtncncctttctactggaccagagattatnnagccgggaatctgggttccctannccttactttcatnactagaangtcgcaacagtaaaattaggagctttgatcagaa

SEQ ID NO: 197 - DNA, 189 bp, Mus musculus
  misc_feature (1)...(189): n = A,T,C or G
ctgaacctgcttgctcanggntggagcttcctgctcattagtnctgccaccgcccactggnggaanctgtgganccacacactggcacctttctactggaccaggagattatttacgccgggaannggntncnntcccccttncttcataactgagngtnggcaacagtgaaaattggagctttgatca

SEQ ID NO: 198 - DNA, 138 bp, Mus musculus
gagctttctgaagaagccccacctgctgagcagcctgcgcttgccttcctgacagatcttgacaaagcaaagagatcctggcaaagtggagaaatgggtccccccccccttaaattcagaccctacaattaaagattg

SEQ ID NO: 199 - DNA, 410 bp, Mus musculus
aacttgggcacctagcaccattgaaagaacttgcccaagaactgctctcgaggtgcctacggcagcctgctgcttctgcagtcttgcttcaggcctgttggcaagcttggaggtttcttcaggatttagttactgttgctggtttgtgcctggtgtcgcttgctgaaaagactgaactgtagctgctggttcatgtgtggtgtctgcctgcctggaggactgctctgcagctgctaagtcgtatttagtgtttgcttacaggactgaactgctgccaaagaagattcaagctcacccccaaagaactattgctgaagaagttcgtttcccccatatcctaataacttctcttccactacctctgctaggtggtaggctagaggagaggttgaacccttaataaaagtagg

SEQ ID NO: 200 - DNA, 170 bp, Mus musculus
  misc_feature (1)...(170): n = A,T,C or G
gggtggagcttcctgctcnttagtnctggcacgcccactggnggancctgnggngccacacactgtgcaccttnctactggaccagagattattcgcgccggnaatctggnttcnntnccncttncttcataactgagngtggcaacagtgaaattaggagctttgatca

SEQ ID NO: 201 - DNA, 132 bp, Mus musculus
  misc_feature (1)...(132): n = A,T,C or G
cctggggcgccacacactgtgcaccttnctactggaccagagattnttcggccggnaattggnttcnntcccncttncttcataactgagtgtcggcagcagtgaacattggagctttgatcagaaaaaaaa

SEQ ID NO: 202 - DNA, 244 bp, Mus musculus
  misc_feature (1)...(244): n = A,T,C or G
actagttcggatcctctggagaacngcaagggcttttagccantgaacaggctctncggccctgtncttactccncctanctgtgcccaaattccatttatncctacatgtcttctggatggaggacacactcaaggagcaaactggttngantggnngctgctgagatttatttacttgttcangcttattttggagacaagagtttctctgtgnatccctggctgncctggaactcactgtg

SEQ ID NO: 203 - DNA, 390 bp, Mus musculus
  misc_feature (1)...(390): n = A,T,C or G
ccgccaatgacaccggtgcctgaaaaantnnagntcaaggtnngtgtgagccacttgatncggattgggaactaacttcagatcctctgcnngaacngcaagtgcttttagccactgaacagnctntncggccctgtncttactccacctacctgtccccaaattccatttattctactgtcttcggatggaggacacaccaagagcaaactaggtaagantggatgctgctganatttatttacttggtcaggtttatttnggagacangagtntntctgngcatccctgnctgtcctgganctcactctgtagaccaggctggcctcgaactcagaaatccgcctgcctctgcctcccaagggcagggattaaaggtgtgtgccaccg

SEQ ID NO: 204 - DNA, 173 bp, Mus musculus
  misc_feature (1)...(173): n = A,T,C or G
gagaagacagaggagcatgtcggctcccctgagattggagtgngaggtcgttgtgagtcaccatgtgcttgctccgaactgaacctaggtcctctgcaggagactcttaattcctgagtcatctctccagcttctggcattagtacttttttaatgtgagaaaattaaaaaaa

SEQ ID NO: 205 - DNA, 201 bp, Mus musculus
  misc_feature (1)...(201): n = A,T,C or G
catactgctgccagacctgaatataggagnttgangatgtgatgtggaagtgaatnnatgnacangcgnactgancantgctctggtttagataattctttttattttttatttttcctttccctcaatccttttttacttttaaaaatagttcttttgtaatgnggtgttcaaaatgaaaattgaatactggcactccat

SEQ ID NO: 206 - DNA, 159 bp, Mus musculus
acctagaagggcagctcacaatgacctggaattccagctccaagacatccaatgccctcttctggactccatgggaactgcactcatatgtgcacaccgtcctttgccccacaagtacatccaatttaattaaaaattcttagctgggaaaaaaaaaaa

SEQ ID NO: 207 - DNA, 189 bp, Mus musculus
  misc_feature (1)...(189): n = A,T,C or G
gactgagaggacctacattcaattcctggcacctagnagggcagctcacaatgacctggaattccagctccaagacatccaatgccctcttctggactccatgggaactgcactcatatgtgcacaccgtcctttgccccacaagtacatccaatttaattaaaaattcttagctgggaaaaaaaaaaa

SEQ ID NO: 208 - DNA, 366 bp, Mus musculus
  misc_feature (1)...(366): n = A,T,C or G
gactgagctttgcaggaggaatctgggaagcaggaaacctcagttgagcaaatgcccccatcaggctggcctgtaggggacttcatgaattttcatgaatgatgtttggtgggaaagagcccattctactaggtcataggagggcatcagatcctctggaattgaagtaacagctgcttgtgagccaccatgtggatgctgaaaactgaacccaggtcctctgcaagagcaagaagcgnncttaaccactgagacatctctctagcactttaaacatctcttgtcacccttaaaggttccattaacccccccccctntntttcctntgtttntggatctgctcatttgacatttttcataactgca

SEQ ID NO: 209 - DNA, 270 bp, Mus musculus
  misc_feature (1)...(270): n = A,T,C or G
tcggacaaggtttctctgtgtagttctggctgtcctanaactcagagatccacctacctctgattcaaaggactaggattaantgcccggttaaagaanatactccagggctggagagatggctcagtggttcagatcacanactgctcgtncagaggtcctgagttcaattcccagcanccacaaggtggctcacaacacctcttctggtgtgtctaaagacagcancagtgtattcatgtacattaaatgaataaataaattgtaaaa

SEQ ID NO: 210 - DNA, 129 bp, Mus musculus
  misc_feature (1)...(129): n = A,T,C or G
tctggagtccagcgctgacccngtggtagaactgaggagctgnnntcaccccgtgtctgcngagttgagcattgctacagccctgctggagaangagagagaggagagagagagagcgagagagagaga

SEQ ID NO: 211 - DNA, 146 bp, Mus musculus
tctttccttatgctctggagtccagcgctgaccccgtgatagaactgaggagctgaaatcaccccgtgtctgcagagttgagcattgctacagccctgctggagaaagagagagaggagagagagagagagagagagagagagagt

SEQ ID NO: 212 - DNA, 379 bp, Mus musculus
  misc_feature (1)...(379): n = A,T,C or G
tgaggtacccacggaattgttgtgtgacggttttttcccgtgaaaacaacagcatcgcatctattcactccagaangggaacgcatgccagaccaaagtagagcgcatgcacggaagtctaatttgttgnaggaaactgctctataccaggagtaanagganaggnctttggatctggagtnccaacctgagggctanggaaccaanctcnagncctntgnnncagtggnntgtgcttttanncgcagagncatctcttnagnccggngctgaccttctgaagaattacgctctagtcagnnncacagcnncagaanccacggactgancaagcacccttgtnaatattgatattanagaacaagacagaggcgtgagt

SEQ ID NO: 213 - DNA, 205 bp, Mus musculus
actgagagtcttgtgtagccagactggtctcatactctctgtctccaaggctggacttgaactccacatcctctatctcctagatgcttggattacaggtttctctgtgtagtcctggaattgctctctagaccaggctagcctggaactcaagagatctacctgcctctacctcccaagtggattaaaggaatgcactaccacc

SEQ ID NO: 214 - DNA, 290 bp, Mus musculus
  misc_feature (1)...(290): n = A,T,C or G
actgaggttttcaaatgcctttccaggctaggacccaggctgtgatctgctggccggacacancancccatgttgccttnccccaaggaccagccatcaggacttggttgtgatgggatgtcgagctgctacctacagaattccagttagaagttctcgctcagccttctcctaagagcctgtgagtcttgtataattcgntgnggcatccgcatgtcagcagttatcctggaaaggtccttnaaagagtggttccttgattaaaacttgctcagcttcaaaaaaaaaaa

SEQ ID NO: 215 - DNA, 228 bp, Mus musculus
tggagagaagcagagcgttatgcgcttgtggtcattgctcctgaccaggagactcgatgcactggaaatcatgacagggcctctgacctgactccactgctgctccactttcttcagtcatctatgttggcattgttggttaagatttgcatttagaaatttctgcattcatcgtaggaaagcattaacacacacacacacacacacacacacacacacacacacaca

SEQ ID NO: 216 - DNA, 220 bp, Mus musculus
  misc_feature (1)...(220): n = A,T,C or G
gaaaagagatccctgctagccagccagtctagcccgtncagctccagactgagtaagtggctctggctcaaaatgatgatgatgatgacgacnangtnnagattgnttgaggaagacacctgangncgatctgagggcaacacagacacatagaccatgacaggcatgcngtgcatgcatgcagncncacacntcacacacacacacacacacacacaca

SEQ ID NO: 217 - DNA, 184 bp, Mus musculus
  misc_feature (1)...(184): n = A,T,C or G
acacagtctctcagaaaacaaagaagaagangangaagaagaagaagaagaagaagaacaagaggncnangangnnggaccggangancgtaggaagaaggaaggaagaaggaaggaagaaggaaggaagaaggaaggaagaaggaaggaagaagaaggaagaagaaggaagaaggaagaagga

SEQ ID NO: 218 - DNA, 136 bp, Mus musculus
  misc_feature (1)...(136): n = A,T,C or G
tgagagcattatccaggaatgaagaaaagtaattggattgaaatacattgaaatacaatgcttgccgggtggnggngnaagcacgcctttaatcccagcacttgngaggcagangcaggnggatttctgagttcaa

SEQ ID NO: 219 - DNA, 191 bp, Mus musculus
  misc_feature (1)...(191): n = A,T,C or G
atatcccttcgggctggngagatggcagcagggctgagttcagtccacatgatggaaggcagaaccagcaggctgtcacagttgtcctctgacccccaggagtgggctgtggctcgtgtacaaacacacaccaaatagaggaataaatgacattttgtttgtttgttntttggtttttcgaaaaaaaaaaa

SEQ ID NO: 220 - DNA, 183 bp, Mus musculus
  misc_feature (1)...(183): n = A,T,C or G
acttcttggggaactctctgaggatctcgacngtaacnngcccantgntggaacctgaggagccgcacacggtgcacctttctactggaccagagattattcggcgggaatcggntcccctcccccttccttcataactngtgtcgcaacaataaaatttgagccttgatcagaaaaaaaaaa

SEQ ID NO: 221 - DNA, 256 bp, Mus musculus
  misc_feature (1)...(256): n = A,T,C or G
actgagaggaccagtggcccaggcagtggtcctgctgccccagtgagctgggccctcctacatcaactgaggaacctgcctgactccagtttgaaggccattgtgccgtaatgttaaaaacagtgttnctctttggagccctggctgccttggaattcattctataaaccaggctgacatccaactcacagaaatctgcctgtttctgcctccagagtactgggattaaaggatgtaccatggcacaaaaaaaaaa

SEQ ID NO: 222 - DNA, 217 bp, Mus musculus
  misc_feature (1)...(217): n = A,T,C or G
ctgaagacgactacagacncacatnatgaatgaccnancatctttaantttattnngattccagggagctcccagagactgagccaccaactaggagcatacacgggttggtcggaggcccctggcaaaaatacagcagaggtctgcttggtctggcctcagttggagaagatgtgcctaatccttgagaggcttgaagccccaggggagggggagg

SEQ ID NO: 223 - DNA, 199 bp, Mus musculus
  misc_feature (1)...(199): n = A,T,C or G
ccaaaggacctgtgtgtgcagacctccctggagagccacaaaacaacggaggtatgctacttttttcttgtttattttngctttttctgagacaaggtctcattatgtantcctagctgacctggaactcatatccactgcctctgcctcctgaatacatggaataaaagcatgtgccttatacatggaaaaaaaaaaa

SEQ ID NO: 224 - DNA, 226 bp, Mus musculus
  misc_feature (1)...(226): n = A,T,C or G
gagacacatctgagaacagcatgagcctgcctggaggaggtgctccaacctctgaagctgtctgcaaaattgtgcagngagcgctgggttcccagattctgtgcctgtcatccatgctggggtaagcttttgatgatgcagctgtctccgngtgacttctgccactgtaagtaaccctccacccatactcctgtaagtaaccacaataaaactcattggtttacca

SEQ ID NO: 225 - DNA, 437 bp, Mus musculus
gactgagggtctccatgacacagggtctccatgacaacaggataaccggaaggaggaccggtgaggatccaatactgatggtgtcccagaagccagagccttggaaccagagcagtgactcactgcaatgaccatttgcaagtgaagatgcgtggacagagggatagactgcaggacacaccatgacacactacagcttccacgatgagatgtttttttatgctttggtttttgttttgctttgttttgtcttttgtttgtttgtgtgtcctttattttgggtgagaggttgaaagagccaagggtggatatgagggggcagggagatgagcgagattgggctgcgcgatgtgaaactcacaaagaatcaattttaaaagtttttttaaaaaaattataaaaagtaataaagaaacatataaacaggaaaaaaaaaa

SEQ ID NO: 226 - DNA, 381 bp, Mus musculus
  misc_feature (1)...(381): n = A,T,C or G
gactgagcctgtccatcacagnaaggaagtcttggcaggaacctggatgccggagctgatgcagaggccatggaggggtactgctcttagcttgctcctcatggcttcctcaggccgttttctcataaaaccgaggaccaacagcccatcaatcatcagttaagaaaatgctctataggcttgcccactnggccaatctagttgggaaattttctcaactaaggttccctcttccaaaatgactataacttgtgccaaattgacacaaaactagccagcacaccaattaaatatgtctactttaaaacatacancccaaagatatagatgtnctgtcagattcctctttagaatgcataaaagaaaaattttggatgtcca

SEQ ID NO: 227 - DNA, 458 bp, Mus musculus
  misc_feature (1)...(458): n = A,T,C or G
gaactgaggtcctctgaagantcactctcatggtcttgcccctgnngaaggcgctcagacctcctttcctngctggaggttgtgtcacacacaggggagtggatgtttgtccttctcctcagtaaacactcctacctgtctaagcacagacaacccatcccccacccccaaatgtatctcactctttccatagccacagttaaaacccacagtccaatcactggatgtagctttctctgttttgaactgagtcccaggtgcaggagctgtaaccatcccagtattgtcaagaaatattccctccaatgctagggtcccaaaatatttgtttatgttattattttatgtgttcagttccaggggacctgacaccctcttctggccaccaagggcacctgcgattacatgtgtataaaaagttatagttttaaataaatcattccctttaagaaaagaaa

SEQ ID NO: 228 - DNA, 441 bp, Mus musculus
  misc_feature (1)...(441): n = A,T,C or G
caggacaggaggcatggtngggnccntactggtctacatactgagtccccaaccagccagagttacactgtgagacctcttctcatgaaaatcaaaaccaccactaaaaagcctctgcatcggctactcgccgagtcaactacagagatgaatctaaaaaccattcctcttcgtggcgagaaaaggctgggacccagaggacggagagcaaacccagccctcggggacttgctccgttatgatggacatgcctcagcgctccagggcggaggggagtcacacaggtatgtaatcagagctcacaagcatccccaacgccagctccaggggatccaatgccctcttctgacctcagcaggcaccaggcacgcacatgctgtgcagacatgcatgcaagcaaaagactcattcaaataaaaattcatcaatccaaaaaaaaaa

SEQ ID NO: 229 - DNA, 236 bp, Mus musculus
  misc_feature (1)...(236): n = A,T,C or G
gactgagacaggttagctgtctccgcttcccagcaccgtctgaccgccattctccatcacagcagattgactcgggtgactgtctccgtggttacaaaggtnctgagttctgttcccagcaaccacatggnggctcacaaccatctgtaatgggatctgatgccctcttctggagtgtctgaagacagcgacagtgtacttacatatataaaataaataaatcttaaaaaaaaaaa

SEQ ID NO: 230 - DNA, 419 bp, Mus musculus
  misc_feature (1)...(419): n = A,T,C or G
acaacctcagacatccttagcttcccatcatggctcagtgtcccaggaaaatacaattcctgtggatgatctctgttgatatcagccacctgctatgcctggcaagacacctgttgtcgtaccaaaaagctacctcctggggacttaaagagcttttatgtttatattttgagacagcatctgtaatggctattcctggttgacaacttgactatatctggaataaaatacaatccagaattganagactcacctgtgatcctgatcttgaggctgggagatagaagtttctggcctggatcttggcatgaagatcttgaggcatagtggctatgaatcccaggagactaaggcaaggngatctcggagntcaaggtcatctggagacaaaagcnaatccccaccagaatccaagatgt

SEQ ID NO: 231 - DNA, 173 bp, Mus musculus
atgcatgcttgggcccagggagttcgagaggtcctgagcaattcctagcaacaacatggtggcgtcacaaccatctgtaatgggatccgatgccctcttctggtgtgtctgaagacagctacagtgtacctcctataaatgaaataaataaataaatctctgaaaaaaaaaaa

SEQ ID NO: 232 - DNA, 273 bp, Mus musculus
  misc_feature (1)...(273): n = A,T,C or G
gttggatggaaccttcttactatatagacaaggctggctctattgtcacagaaatttgcctgttctgcctcctgagtctgaaaccacaacacaacttctttatgtagcctcagatgtcctggaacttgctccatagaccaggctggcctcaaactcagagatctgtctgcctctgcctcctgagcgctgggactaaaggtgtacagacaccancatctggccaagggtttttgttngttagttttttaatactcaattaattattgctcacag

SEQ ID NO: 233 - DNA, 251 bp, Mus musculus
  misc_feature (1)...(251): n = A,T,C or G
ccgagagctcaccatggcnactcntttcttgtagancatgcaccgtantnttgcctacaagaccantcnggagtcacagcctcttcaaccctaagtccagccagtagtcactggatcctacgtatgggggctgtaagagcaagacaagcagcgttcattcgtggtctctgctttagttcatgtctctaggttcttgccttgagttgctactttagtttccctgtaacctgtaagccaagagctaaaaataa

SEQ ID NO: 234 - DNA, 248 bp, Mus musculus
  misc_feature (1)...(248): n = A,T,C or G
attccaaagtttccaacagaagagccagccattgggtgcagaggagcagcctgagtcctgtgagacagtgtttcttggtatagcctttggctgtcctgaactctcaatgtagaccagcctggccttgaactcagaaatctgctagtctncttcccaagtgctgggactaaaggtgtgtgccaccactgcctggctagatttaggtgtttaagtaaatatcagagttaatgngcctgtaaaaaaaaaaa

SEQ ID NO: 235 - DNA, 281 bp, Mus musculus
gactgagctttgacaaatgccaaccaacctccctaaatgaccaactaccacccacaccccttctcagggccctagtatttaaaataacctccaggggctggtgagatggctcagcgggtaagagcacccgactgttcttctgaaggtcctgagttcaattcccagcaaccacatggtggctcacaaccatccctaacaagatctggcgccctcttctggagtgtctgaagacagctacagtgtacttacatataataaataaacctttaaaaaataaaata

SEQ ID NO: 236 - DNA, 275 bp, Mus musculus
aggatcaaccagaacgggacgagacagcagatgctcctgctgcagtgacttccctacactgatggactggaacctggaactgtgagctgaactatattctcagcaacaagagaaactccgcacagctcccaggaaggtgagcagcacccctgactgtcatgaggcattttcattacctatccagttgttaggaagatcgtctttttcttcaagttaatattgttttctttactaaatcttactgcgtaaaaattaaccactttaaaatgtataat

SEQ ID NO: 237 - DNA, 248 bp, Mus musculus
gactgaggattaattaggatgactttcagactgcggttcagataatccaaaaatggctccaacggggttggagagatggctcagtagttaagagcactggctgctcttccagaggtcctgagttcaaatcccagcaaccacatggtggctcacaaccatctgtaaagggatctggtgtttctgaagacagctacagtgctacagtgtactcatataaataaaataaataaattttaaaaaatggaaaa

SEQ ID NO: 238 - DNA, 473 bp, Mus musculus
  misc_feature (1)...(473): n = A,T,C or G
gtgtcatcacatgacaaggacctccaccgggaccctggtgacatcaccggaccacggacatcaacacagccctttgccaaagcaccagccacggacaccaacacggcttcaggtggcagcacagcccgcagacaacaacatggcttcaggcaaggtacaaaccattnnacatctgnatgatcttaggaggtaacatggactctagacatcaacctggctcccaggacatcaggaccacagacccaaacatggcccttggtaacagcatggatcacggacatccacatggcactagggcttcatcatggcctggggcatcagtacagatctttgatgccagcatggcctctgggggaagttcagaccatggaggtcttttcaaagagttccactttaggaaatgaagtatttttcatcgtagacttcctgtttagaagccagggcgctgantctgtgcaagctccaggctgctg

SEQ ID NO: 239 - DNA, 405 bp, Mus musculus
  misc_feature (1)...(405): n = A,T,C or G
actgagccagaggcagtagaaacaagganagatcaagactggaccgngaagcaccaggaactgactaaggtgcataatttacccaccaaagcagagctggcctccaggttccncagcgcccacctcannccctacctggcataccctgcccacancagggaactttccagnccaggtgcttgnccgccctcccncaagagtctcctnccaatataanccagacatttagnctctgcccttctctctcttcctctccttctcttntttctnctncaatgctcccttttgctnccctacccccacccccatggcaatnccatggcctcaatccctggggncagtgaacctgcccgcctgagagtagcatcccaataaacctgtcttcaggtactccaaaaaaaaaaa

SEQ ID NO: 240 - DNA, 231 bp, Mus musculus
  misc_feature (1)...(231): n = A,T,C or G
cctaccttcatacgagcgagagcatgtgtgagagggctgganagacggcccagcagttaacaacacttgttgcttttgcgganagaccaaggggaggatcaacgnggcatatgctccaatgatgacccagacctctacctcctggggagccggagccctcttctgactcccttgggaactctcacacatttgcctagacacacacctacacatggattaaaaataaaaata

SEQ ID NO: 241 - DNA, 457 bp, Mus musculus
  misc_feature (1)...(457): n = A,T,C or G
tgagatgagtacattgttgcagtctacagacacaccagaaaaggatgtcagagaccccattacanatggtngnnagccaccatgtggntgatggaattgaactcnngacctntggaccttaacntctgagccatntccccagccccctctcaagttccatctcataggacgactaagaaacactcccaccccttttgataactgaggtggtttggaccctgcattggctggaggaggtaaaaccatgacaaccaacaactgtcccttctgtttctggtgagattctgagagagctgcaggtttagaactgggcagagggaaaggccataagcagttggtaattaactgcgctggattcctgctcctctgctgagaggcctcagagatgagggttccttcatctcatgtgcctgtcgcctatcctgcctnagggacggctngatcttatttggattgg

SEQ ID NO: 242 - DNA, 422 bp, Mus musculus
  misc_feature (1)...(422): n = A,T,C or G
gactgaggtcccgggaatccagngccctcttctggccttcttcagnactgcactcatgtgctgcacacacctaacatgcgggcangacaccctcatacagaaaaagaaaatcttgaanaaattacagtnggaggcagcagaggaagacacctgacntcaactttcgccttcaaatacggacacacaccatttctttctttttttttttnaatttnaggaaaaatntnactagtgggaaaggaacctgaaccagaactnaannaagttctacctctcctgtggatgcgganagtctctctcggctgggaatcccactggctgtccatgtgtcagaagctcagaacacccccacacctgcctnaccggnngntcgctttctcaggacactgnccaccctgagtgacacctgactttcagaccca

SEQ ID NO: 243 - DNA, 125 bp, Mus musculus
  misc_feature (1)...(125): n = A,T,C or G
ccacacacgctcaccctttcttcngnacnagagataanncaggtaggagaatcgagcctcngtccccattacttaataantagtgtcacaacaataaaatttgagccttgatcagaaaaaaaaaa

SEQ ID NO: 244 - DNA, 283 bp, Mus musculus
  misc_feature (1)...(283): n = A,T,C or G
gactgagaggccagagtaggacatcangacccttgggactagagctgcagatgattgtgatctgcacatatggatgctggcaaccaaacccagatctgctataacagcagtgagtgcccttagcctctggactatccctcagacacggtttctctgtgnagcctttgctgtcctggaactcactttgtagactaggctggncttgaactcacagagatccaccagcccctgngtcctgagtgctacaaccagactaaaacagcaaaaatttataaaaaaaaaa

SEQ ID NO: 245 - DNA, 496 bp, Mus musculus
  misc_feature (1)...(496): n = A,T,C or G
actgagaacatctgtcattggagctcaggattcagctagactggtcagccagcagactccagggatccccatctctgcctcttgagcattcagagaggtcctttcttggcttctggaattcggcgaagatcctggcaagcccagcctttgggcccatggctgcctctgactcaccataggcctctgatgagtccagtgacatgttctaccaacagatacaatttttcaaaagctggagttttatcctggggccccttgactcctttggtctccttaagttctcttctccttcttctcctttttcttctctttttcctctttctcctcctcctcctcctcctctgcagctttccagtctgtcctgacatgtacacacccattctgcagtccacctatagatggtcccattagcatagagacaatatgagggagggatttgntctgacttcttttaatcatgtctacctttntgntntattctccattctctcttttt

SEQ ID NO: 246 - DNA, 305 bp, Mus musculus
agtccagctctgtctgtgatcctgagatcctgtgtgtaagagctcctggaagtcaagatgcctttgggatcctgaaatcctggtgtgaccaagttctgccatcctgtaatcctattctcctataatcctggatgtgttagagcacatgggagtgcaccttcctctaggtgttgtgggattaggtgcacagctagcagccaaggtctgctcagggactggctcaggctagaaagacttaatgtattatatagtaaatgtatcatcaatactctgtaacattaaagatgattttttgtttgtttgtt

SEQ ID NO: 247 - DNA, 307 bp, Mus musculus
  misc_feature (1)...(307): n = A,T,C or G
gacctccaacagctgtactctcaagaaagnccttgnccanagccctgatccatgtcccctgaggtcttgtgtgggagtgtcctggagattccatgtctgctcaattaattagtgtgtgtatgggttggagagatggctcagccgtgtacacactgctcttccagaggccctgagttcaaatcccagcaaccacatggttgctcacaaccatctgtaatgagacctgccctcttctggtgtgtctgaagacagctacagtgtacttacatataataaataaataaataaataaaacaataaaacaaac

SEQ ID NO: 248 - DNA, 219 bp, Mus musculus
  misc_feature (1)...(219): n = A,T,C or G
ccgttacagatgactccctggaggctcagcttcacgaatacgccaagcaagggaactgcgtgaagctcaagaagattcttaagaagggtcctganttcnattgccagtgntcacatggagnntcacatccatccttaatgagatctgntnccctcttctggagtgtctgaanacagttacantgtacttacatatnataccnaaataactaaatgtata

SEQ ID NO: 249 - DNA, 336 bp, Mus musculus
  misc_feature (1)...(336): n = A,T,C or G
ctctggcccatagtactgccaaccttcctgaggaggcctgcagtgttccaggaccttccagattagagccttctcccacaagccccctgcttgctgggtccacctggggcaagccagcagagagcttcattatcaatgctgttaataaagaactcagatgtgggntggtgaganggctnagtgngtaagagcaccngactgctcttccaaaggtccgaagttgaaancncancaaccacatggnggnttacnaccntgcatancgagatctgacnccttcttntggtgtgtctgaaagacagctacagngtacttacatataataaataaataaat

SEQ ID NO: 250 - DNA, 318 bp, Mus musculus
gactgaggtaatgccttggcaatttagacgcccaagtggagcagagagagcatctctcctggctttacaaaattaaacctttcctctggatccagatgtttaatcagctaactgtaaatgcagctggaattggtttcctacctccttctggaagactcaaatgaataccaataatgaagatcaaccaagatatacataccacgtagagcagtggttctcagccttcctaatgctgtgaccctttaatacagttcctcaggctgtggtgaccccgccaaccataaagttcttcttgttgctgcttcataactaaaaaaa

SEQ ID NO: 251 - DNA, 135 bp, Mus musculus
  misc_feature (1)...(135): n = A,T,C or G
gcccgatttggactgactggctgccttcctcctcctccccctnctnccccttctgcttcagatntatttattatatgtaagtacactgtagcagtngtaggacacactagacgagggcaccagatctcattgtgg

SEQ ID NO: 252 - DNA, 289 bp, Mus musculus
actgaggtgtctcggaacaaggtttctctgtgtagttctggctgtcctagaactcagagatccacctacctctgattcaaaggactaggattaaatgcccggttaaagaagatactccagggctggagagatggctcagtggttcagatcacagactgctcgtccagaggtcctgagttcaattcccagcaaccacaaggtggctcacaacacctcttctggtgtgtctaaagacagcaacagtgtattcatgtacattaaatgaataaataaattgtaaaaaaaaaaa

SEQ ID NO: 253 - DNA, 323 bp, Mus musculus
  misc_feature (1)...(323): n = A,T,C or G
gactgaggtttgcttccagctgcttgcagagnaccacaaacatgatgtcgaggatcatggctgctagaggagtagcttatcgacaagtaggaagcanaaggtgaactgggaatggtgtgggctttcaaaatctgaaagcctcctccaacaaaaccccatctcctaatcctttccaaacagttccacaaactggggaccaagttttcagacccatgagcctatggtggaggggttgttctcattcagaccaccacactccctttgcaggtcatccccctaacccccaccccaaataaatgtgtgcatggtcttaaaaaaaaaaa

SEQ ID NO: 254 - DNA, 245 bp, Mus musculus
  misc_feature (1)...(245): n = A,T,C or G
actgaggtaacagcagaacatggtggggtttgcctacaaccccagccctgggcagacagangcaggaggatncttggagctcaccggcccctttcaatttcaggtcctgagttcaagtcccagcaaccacatggtgactcacaaccatctgtaatgagatctgacgccctcttctggngtgtntgaagacagctacaatgtataataataaataaaatgtataagaataaataaatcaaaaaaaa

SEQ ID NO: 255 - DNA, 170 bp, Mus musculus
  misc_feature (1)...(170): n = A,T,C or G
gaggaatgtgagaacatgtgcctgggacatcaccttgttcctcttcatttgtaccgaggatgctacagngaagcaccatctagaaacctgagactgatactggatcttggatttcagacttcccagcatccagaacagtgagaaataaagttatgtgctttatatcctaa

SEQ ID NO: 256 - DNA, 543 bp, Mus musculus
  misc_feature (1)...(543): n = A,T,C or G
gactgagaggcacatgtgagggtaatctggctgaaaatctgtcatcttattgatcatcaagatggactctgctgatccaccctgcttggccagggtccaactttcccctcactgccctacctacattcctcctgaagaggacaacctctatcagacgactgcactctggtcagagtgcacatgtctctgtactcctctgctggaagctccaaacaagctcttgtttgtttgaaacaagatctgggctatgtaggcctggacatcctggaaatttgctatgtagaccgggctgggattaagctcactttatacaagaaacattaacaggaggctggaaagatagctcagcggttcctagcacccacatggntggttcacaacagcttgtaattccagctccaggagacttaataaccccccgctctgaactgggagggtgcacgnggcagattctcacagatacacaaacacacacaaatttcttnttaaaaaggaaacattaacagattctagaggaactggatgaaaaggaataaaaaaagg

SEQ ID NO: 257 - DNA, 237 bp, Mus musculus
gtgagcaccaaccaccaactccctcctcaccatgccctcctgccctgaagactccatttgagaggctggagagatggctcagcagctaagagcactggacccaggttcaattcccagcacccacatgacaactcacaacatccctaactccagttctagaggttttgacgccctgaaacagacatgcatgcaggcaaaacaccattgcacataaaataaagaatcttttgtcatttt

SEQ ID NO: 258 - DNA, 346 bp, Mus musculus
  misc_feature (1)...(346): n = A,T,C or G
tgcactgccacactcagcgtcatgcagtgctgggacacaggtcaatctcagggaccacccgatgtaatgtctgtcactgggacccagatgtggagaggttggctggccagtgaatcccacggatcctcctttctgtaccttctcaaccgtggactcacagctgtgtgccaccatacccagcattttgcatgggtgctggggtttgaactcaagtcttcatgcatgcaaagaaagctctttactgactgagccatttacaaagcccttattgctgttgttttctgagctagggtctcttgtatcccaaactgacatgcaacgccacgtntnctgctgaagaagacct

SEQ ID NO: 259 - DNA, 143 bp, Mus musculus
  misc_feature (1)...(143): n = A,T,C or G
aagccagagacaggatctctctctacatagccctggctgtcctggaactttctatgtanaccggncntggccctgaattcacagagatctgcctgccactgcctcttcaatggtggnattaanaggctgcaccaccaaaaaaa

SEQ ID NO: 260 - DNA, 346 bp, Mus musculus
  misc_feature (1)...(346): n = A,T,C or G
ctactgctccagtgtcaccatgcctgcctgcctgcctgcctgcctgcctgcctgntaccacgctccttgctctgacctggactctaaccctctaagagtaagcctnagtaaactcttccatgngtngccttgnccatggngtctcccancaacagcacactgaccaagacattaagantccgcatttccatggnctctcgtgtgcagntgaagaggccttgaggacttgngttctccatgatgggtgacacttaacctaggcatagccaaacagagagtggggcatgtggccatgtgcccagtgagggatcctgttctgtgattgacacccagtgcctcacagcag

SEQ ID NO: 261 - DNA, 321 bp, Mus musculus
  misc_feature (1)...(321): n = A,T,C or G
tggcaggtctcgaacntcactacgcagatgatgattgtggacctgtctccttgtgcctactacagatggacaaccaccaagcaggtttatgcggtgctggggatcgaacccagagcttcatgcaagctaggnangtgcttngccaacngagncncactncccagccctgtncctnagattctnagggntgaacaagattaccatctggggaaccttacttgctcacccaagtccagtgcttgggtgaggtantggnagggagagggagnncaaggnatanncgccgtctngatggggaccccaattgcccctgaaagacac

SEQ ID NO: 262 - DNA, 383 bp, Mus musculus
  misc_feature (1)...(383): n = A,T,C or G
gcggctcagtaagacccatgtctcaagaaagcaaaagcttagaggggcctccatggactataggagccgaccccactggtctgtcccagggacagcagagctccttgcctttgacggaagtgtcctgtcccctggctccgtgtctccagggccnctgctcatcttctgaaggaagcctncccagccctcctcctcagncctcacttagttctaaaacacccaccgacaatgcccaacctcatgatggagttcctgaaataagaaccagggaagggggctggagggatggctcagcagttangagcactgactgttcttccagaggtcctgagttcaaatcccnagcaactgcatnggtggctcacaaccatctgtaattggat

SEQ ID NO: 263 - DNA, 257 bp, Mus musculus
  misc_feature (1)...(257): n = A,T,C or G
accttcccggagattgcagncttgccaganagccatccatgcactcaggaggtacagaggtttgcacagtagttcaagctgggctccagtncaggctcctnctgtctcagcctcgcaagtactatgactccaggcctcctgaattngctgtgttccagatcctttaaaaagtnagntcaaatcccagcaaccacatggtggcttacaaccacccgnaaggagatctgatggcctctagctacagtgtacttacatat

SEQ ID NO: 264 - DNA, 279 bp, Mus musculus
  misc_feature (1)...(279): n = A,T,C or G
tgaggaaccccctcaacaaaccactgactcccaagcccttgtctcaggctctgcagtcaagaggacccaactaagacaccaggatgatctaggtcaaggagctgtgcctgctttacgcaaaggaggaaagaagttcccagctctgtggccagtgacaggagagccaccagaaaccagcagaagccaccccgacccctctcttccctgccatctgtcccctacctatctgtcaagcagggttaaagagtaagatttacctaganctgtgaaaaaaaaaaa

SEQ ID NO: 265 - DNA, 236 bp, Mus musculus
  misc_feature (1)...(236): n = A,T,C or G
ctcgcttcgcttcatatctgtccgacaanagcctagnatgccnatncttnttccttaaaanaggnctcnctgtctgcagtgctagctcagcgggtaggagcactggctcttcttcacaagatggagattcggttcccagcacccacgtggcagctcactgctttctgtaaccccagttctcggggacccaacaaaaatatcaatacacataaaatagaaataaatcattaagaggg

SEQ ID NO: 266 - DNA, 224 bp, Mus musculus
tcttgacttctgatcctcctacattcacctttggagccatcggattgtacgcttgtaccaccacgcctggttttgtggtactaaggattgaacctagggtttttgtgcatgctagcaaacattctaacaacggagctacatcctctgccttatcaaatgatatttaaaatgtcaagacacatttacaatggaaaataaattgtatgcaaccctaaaaaaaaaaa

SEQ ID NO: 267 - DNA, 328 bp, Mus musculus
  misc_feature (1)...(328): n = A,T,C or G
ggatttcctccagagacacatgactgcggacctagactcgagggtctgctgctaccgctggttcccagactccagtcaagtgaccttctcttccagcccctgagcgcctcccacccccacgccactgcccatgtggtaaattggttgagcacagcctcatgtggtgcaccagaaatccctacatttgggaggctgagaaaagacgggnttttggctatgctggaactcnctctgtanactagaccaccttttaacctanaantccgagatccgcctgcttctgcctccggagtgntgggattaaaggcgtgcacaaccacttgtctag

SEQ ID NO: 268 - DNA, 242 bp, Mus musculus
ggggagcaggaaagagcccgcaggatgtggcaagcaacgctcagagggagcaaagcagcagccagaagcctcaggatctacaggagcagagggtttgcttagcaggtcctgagttcaagtcccagcaaccacatggtggctcacaaccatccgcaatgagatctgatgccctcttctggtgtgtctgaagacagctacagtgtacttacatataacaataaataaatctttaaaaaaaaaaa

SEQ ID NO: 269 - DNA, 417 bp, Mus musculus
  misc_feature (1)...(417): n = A,T,C or G
tgagactcggtccccagccctggnntggcaccgccccaatgagctgggccctctcccatcaatcactaatgaagaaaatgcccagcagatttgcctgcagtctgatcttatggaggcattttctcaattgaagtttcctccattcacatgactacagtctgtgttaagaaatctagccagcacaaggatggtgatatctccagtagctctttggctgttaaagattggtttagctatcctaagtggggtttttgttgttgttgttgctgctctgtgtatttgcatatgaaactgaaaattgtcctaaaattattaagtctgtgaaaaattatctgttaggtctcaaacctggggccaaatgggtaactaaggtgcccatttaacatattaaacctgacctggctaccaaaaaaaaaa

SEQ ID NO: 270 - DNA, 197 bp, Mus musculus
  misc_feature (1)...(197): n = A,T,C or G
tcgggaacctctcattcagctgagttatgctgtacttactgcttccagctaaaanatgnacaganttacatagggatggagagatggctcatcagtagaccgctcttgcagaggacctgagttcaattccaaggacctgagtttaattcccagcattcataccaaataaatcaccaagtacctgtgaaaaaaaaaaa

SEQ ID NO: 271 - DNA, 296 bp, Mus musculus
  misc_feature (1)...(296): n = A,T,C or G
gactgagggtccctttcacctgactcctantgcggccctgggacttctgcatccccatcaggacaagatcattgatgaaaacaaaaagtgagacaagggctggtgagatggctcagtgattaagagcactgactgctcttccaaaggccctgagttcaaatcccagcaaccacatggtggttcaaaaccatctgtaacaaaaatctgatgccttcttctggagtgtctgaagacagctacagtgtacacacatataataaataaataaataaataaataaatcttaaaagaaaaaa

SEQ ID NO: 272 - DNA, 181 bp, Mus musculus
  misc_feature (1)...(181): n = A,T,C or G
ctggctagtggtaaagagcacatgacntgctcttccaaaggccctgagttcaaatcccagcaaccacatggtggttcaaaaccatctgtaacaaaaatctgattgccttcttntggagtgttttnagacagcgggngngtacacacatataatnaataagntaatataaataaataaatct

SEQ ID NO: 273 - DNA, 182 bp, Mus musculus
  misc_feature (1)...(182): n = A,T,C or G
gcattgtacctgggtcctctgcaagaacaagtgctcatanctgntganccatctctccagccttaaaggagacacanagaactgggacaggagccaaagcaggacacagaaatgaggaaatggctaacacctcaggctcanagtggtaataaaaggaaggattattcaacctggagaagcat

SEQ ID NO: 274 - DNA, 126 bp, Mus musculus
  misc_feature (1)...(126): n = A,T,C or G
agccacacacagggcaccttnctactggaccagagattattcggccgggaattgggttcnntnccccttgcttcataactgagtagtngcaacagtganattggagctttgatcagaaaaaaaaaa

SEQ ID NO: 275 - DNA, 262 bp, Mus musculus
  misc_feature (1)...(262): n = A,T,C or G
actgaggtggggtctttcccaggnnatccagnactacatctcaaaaaaacatcaaaaatgtgtttgtggactggagagatggctcagcagttaanagcactgtctgctcttcccagaggtcctgagttcaattcccagcaactgcatggtanctnacaaccatntgtaatgggatcanatgccctcttctggtgtgtctgaggacaagctgcagtgtactcacgtatatgaaataaangaataaatctttagaaaaaaaaaa

SEQ ID NO: 276 - DNA, 285 bp, Mus musculus
ttccctggaaacacagcattttccgcttccgccttcaggccagcaagataagggagctgctggctgacaagggaggagatgtagtctcccctcccccagcctgaaacctgcttgctcggggtggagcttcctgctcattcgttctgccacgcccactgctggaacctgaggagccacacacgtgcacctttctactggaccagagattattcggcgggaatcgggtcccctcccccttccttcataactggtgtcgcaacaataaaatttgagccttgatcagaa

SEQ ID NO: 277 - DNA, 191 bp, Mus musculus
  misc_feature (1)...(191): n = A,T,C or G
aaagatggctcggaccatggatccaggctccatgcttcccaaactggaacagaaagacaggagtgtgaganagcggcgctgcagganacgtgccacataaaatagntnaaataacctcctgcttnctgatctgnttgagttccagtccngggnnncttggngatgaacancactntcgaagggtaagctcg

SEQ ID NO: 278 - DNA, 402 bp, Mus musculus
  misc_feature (1)...(402): n = A,T,C or G
cctggacagggtcgctgcngacaaagtgttcagctgagcagcnctgctgagctcttcggtgggaangccatgancgcgtctggttgatangacttatggaacatctcaagaagaggtcccatttgngccanaccttacagtgctaaggggatctcagcnaacagaanatgggaggacagaatattccanacccgggggaggtgcnaggtcttgctgnaaaaatgtgtttcanggctggagaaatggctcagtggttganagcactgactgntcttccagaggtcctgaggtcaattcccagcnaccacatggtggctcacaaccatctganatgggatccnatgccctnatttggnatgtctaantacagctacagtgtactcntatatataaaataaataa

SEQ ID NO: 279 - DNA, 199 bp, Mus musculus
  misc_feature (1)...(199): n = A,T,C or G
caatggaaaatactgtcacagatgntncagnggntaagancactgactgctcttccgaaggtnctgagttcacaccgnagnanctacatggtggcgtnacaaccatccttaatgagattatgangccctcttntgnagtgtctggnggacagctacancgtaccttacattatnatgaataagtttaaaaagaaagaaa

SEQ ID NO: 280 - DNA, 208 bp, Mus musculus
  misc_feature (1)...(208): n = A,T,C or G
gcccccccatatatgccaagtcctgggctgcggaagtgcagggaatagtcactgatgtgaatagtccaangggnaggaccntggctcaggtcactcaggaaaacaagaaacctagacacctggactccataaggntggaagagtcccctgcccccgcccctgcccccgcccccgtgtccaccttggtaactaaatctgacctataccc

SEQ ID NO: 281 - DNA, 344 bp, Mus musculus
  misc_feature (1)...(344): n = A,T,C or G
cagggattgccaccaatatggnaccgtgtctagnntncgcacagttagacgtgagaggtgagtactccctagccatttggcggtgagggtgaacttcatagtcatctttccttcccagtttacgtatgaaccataaaggtttaacttaggggctggagaaatgactcagcggttaagagcactggccctgccgggcgatggtggcgcacgcctttaatctcagcattcggnacgaagaggcaggcggatttctaanntcnaggccancctgnnctacagagtgagtnccaggacagccaggnctatacanacaaaccctgcctcaaaacaccaaaaaacaaaaa

SEQ ID NO: 282 - DNA, 162 bp, Mus musculus
  misc_feature (1)...(162): n = A,T,C or G
atctgatgccctcttttggcgtgtgtgnagacagctacaggtgttactcatgtacgatnagataanttactatttanannaccctctgntattctaaacanacatcttnggngggggcagggnccttcnccgaacgggccttccttttcttttccaccctct

SEQ ID NO: 283 - DNA, 474 bp, Mus musculus
  misc_feature (1)...(474): n = A,T,C or G
aaggttgctagagccanggaggatggattactcatanaaagcngggncttcgagattcaatgcacgtacgaccttccagtggctgttggcatgcacaggtccaanttggccagagtcacagatntaanaagaggaagngtacacaggtgtttcagccctaaccaanaagctatttgnaattggtatctgatggcagggaaaannagttctctcccatgaaatatcacagggtgtaccaaccacactgcagggcaggccctatgctcaggataattggctaacacaaaatgaactcagctgcatggttttgctttgctctgagctacccctgccccaagacagggtttctctgngtagccctggttgtcctggaacactctctgtagaccaggctgtcctcgaactcacagagatctgtctgcttctgcttcctaagtgngagattaaagacacgcgtcaccaccaaaaaaaaaa

SEQ ID NO: 284 - DNA, 268 bp, Mus musculus
  misc_feature (1)...(268): n = A,T,C or G
agtttgactgggttatctatncnaaactncacttatgggctggagagatggntcagtggntangagcaccanctgctctaccgnnggtcctganntcnaattccagcatccacatggnggcatacaaccatctgtaacagagatctgacgccctcttctggtgngtctgaagtcaactacngtgtacttatgnntaatantnaataantntttttaaaaaacttcagccctattctngngngtctgaagtccctacagtgtacttatg

SEQ ID NO: 285 - DNA, 388 bp, Mus musculus
  misc_feature (1)...(388): n = A,T,C or G
aatgaagacctgcctacttctcttctgnctanctacaggctataggcatcnttattgaccaatcagagataacttggngacaccattacagagcntcatnnggggtctgtgatggattcctggtccctggaggataccngaccactgggggcatggnnttaaccnttanaagncttaccaacagaccaanncncaccagctagagctgnagagacgttngataagagttcatattgctgtggncaaggacccaagcttggtncccagcacccacatanggnaacacaccgccgnnagnngctccagctncacaggattcgccaccctcttttagactncttgggcaccaacaggagtanaaatatgcacactcatgcgcaaaaataaa

SEQ ID NO: 286 - DNA, 344 bp, Mus musculus
  misc_feature (1)...(344): n = A,T,C or G
gctgcagactgtctcagangctggaagangatgaggagcttnagggctgtgtggaccancggaaggcnaacangatgagnacagcctgccctccccttcccgttgcccagcaactctggncggnggtagtccattcctttaacccaatattggggaagcagaggcaggtgcatctcatgagttcaagcctggtctatatagttccagaacagcaggagttacacagagaaaccctgtctagagaagccaaccaaagaaacaaaacagagtaagacatacatctcaaaatgtaaacagagacaacaaacattgcaaataaagcaaccacttggtaaaaaaaaaaa

SEQ ID NO: 287 - DNA, 181 bp, Mus musculus
agccgtgcctttggtgacatagagggcttcaagacgcctccatctgaaggaacaggctgtgcaatgcttcacatggattctggaagaacatcaagcactcttaaccactgagccatctctccgacccctgaattttcatgtactagctttctggcattgtgcttgttcattaaaaaaaaaa

SEQ ID NO: 288 - DNA, 381 bp, Mus musculus
  misc_feature (1)...(381): n = A,T,C or G
tgagggaagctggaggaagaaaaggcaggagcctggagcagaaactgaagcggagaccatggggaacatgcgttgttgatgcactccctggcccgctcagcgagctgcctttcctatacatcaaaggccaatctgatggagaccctgtctatgctgagggtcctctcttcccaggagactctaatttggcatccatctgcatggntaagatgatgaactgctagatatttctttagattagcaagcagcaggaatcaagatccaagatccagcctgggtggtggcctgcatttaatgccaacatgtggtaggccaaggcagatctctatgagttccaggccatccagggctacaaagtgagaccctgtctcaaaaaaaaaa

SEQ ID NO: 289 - DNA, 279 bp, Mus musculus
  misc_feature (1)...(279): n = A,T,C or G
acatgactttagaacgtttnccggagctnagacanntgcntgtgaggaaagaaaatgaanantnaaancccgggtnnnggccanaagnaancacgagacaagaanccgagctccttgggccagctccaaggctggcagcggcttcccagangggcctctgtatcctgaaggccagccggctggggtgctgctggngagctccnagtccttcgacctccnccttttacagatgaggaaactgagtcncagaggatggngcgnggccaacatggagcatgg

SEQ ID NO: 290 - DNA, 131 bp, Mus musculus
  misc_feature (1)...(131): n = A,T,C or G
gttacccatgttgcagctcacaactgnccataaccccagtgtcaggaaaaccgatntcctcttctggacaccaggtatgtatgtagtgcacaggtatacactcgggcaaaacactcataaaattaaaaaaa

SEQ ID NO: 291 - DNA, 179 bp, Mus musculus
aggttcctttgagttcctgccctgacttctctcagtgatggtgtgtgacctgggagttgtaagccaaataaaccctttcctccccaggttgcttttggtcatggtgcttttattatagtaatagagccatttacaaatttaaaaagtaaaataaaaactacacaggaattaaaaaaaaa

SEQ ID NO: 292 - DNA, 434 bp, Mus musculus
  misc_feature (1)...(434): n = A,T,C or G
tcccagcatcctttcaagctaanaagagcccagctagacagcttcctgactggcctcanngggnntattggaaaggagtgtatccggcaataaagactgctgagacatgccaaactgcctggaaaaagcatgagttcagaagcctggaagaagcaaagaccagccaagcagcttanaagaaacaagaaccagcctagctgccaggaagaggctcacncggnggaggcatgcagaactaacaccctctgacctattgagctgcctgcaggctgtgcagtgggccccaggttcccagtttttgtgagctgtcaaccatgggggctgtgggagggctttggtgatggatctgtctttgagtcatttccgctcctgtaagtaacctcacatttgtatttctgtaagtaatctggataaacctcattggtctaccaaga

SEQ ID NO: 293 - DNA, 255 bp, Mus musculus
  misc_feature (1)...(255): n = A,T,C or G
ctgctgagagactcgaaccagngcccatgcangaccgagaaagacccagccccttggcattctagacaaggnantgtcctaccctgagctacttangaagtnnttaanattaggtcttgctgggcgtggtggcgcaagcctttaattccagcacttgggaggcagaggcaggtggatttctgagttcgaggcacagcctggnctacagagtgagttccaggacagccagggctatacagagaaacccctgtcttg

SEQ ID NO: 294 - DNA, 236 bp, Mus musculus
  misc_feature (1)...(236): n = A,T,C or G
tcatggaggcatttccccaactgaagctcctttctctgtgataactccagctgtgtcaagttgacacaaacccagccagtacagaggtggagggcctgctttatctctatgttcaatcctcaggcctctaaataaaaatatcccaaacaagaaggtaccctatgggggctggagagatggctcagtggttaagagcacttgactgctcttncagaggnnctgagttcaattcccag

SEQ ID NO: 295 - DNA, 177 bp, Mus musculus
cccagggctttctcttcctggtgccatggatctggatgtaggactcttggcttcttctccagtaccacttctacctgcatgccaccatgctccccccacccccatgatgaaaatggactaaattctgaaactgtaagcaagccccaaataaatattttctttagttaaaaaaaaaaa

SEQ ID NO: 296 - DNA, 406 bp, Mus musculus
tgagtcggaagtaagacggcttcattctgcccactgacagatgaacaccatacaggcgttcagagcattgcatagtgagttccatgcgcaaatcactaccgttcctccttattatgttcatcttaaagattattgcttttgtttacttttatgttcatgcacatatattttgtaaatatatgccatgtgtattctgctgcccagggaggccagaataagaatcggatctgccggaaccatagttacagatggttgtgagccacctggtatgagtgttggtcttctgtgagagagcagcaagtgctctaaccactggaccatctctccatcccttattattattattaaaaacaaacacccctcccaaacaataccacctttgttttgtttttgtcaaacacaagtg

SEQ ID NO: 297 - DNA, 167 bp, Mus musculus
ttcctggcacctagaagggcagctcacaatgacctggaattccagctccaagacatccaatgccctcttctggactccatgggaactgcactcatatgtgcacaccgtcctttgccccacaagtacatccaatttaattaaaaattcttagctgggaaaaaaaaaaa

SEQ ID NO: 298 - DNA, 224 bp, Mus musculus
cttttgaatgttctgccagcctgcctagtgctatgtctccaccaacgatggtcaagaactcaccctctgaaaaggatgctacattggatcaagatgtagaacactcagctccttctccagcaccgtgtctgtctggatgctgccatgcttcccaccatgatgatacaggactgaacctctgaacctgtaaaccacccctaattaaatgttgtcctttatgagaa

SEQ ID NO: 299 - DNA, 162 bp, Mus musculus
  misc_feature (1)...(162): n = A,T,C or G
gcctgggacactcaccttgttcctcttcatttgtaccgaggatgctacagngaagcaccatctagaaacctgagactgatactggatcttggatttcagacttcccagcatccagaacagtgagaantaaagttatgtgctttatatcctaacaaaaaaaaa

SEQ ID NO: 300 - DNA, 173 bp, Mus musculus
  misc_feature (1)...(173): n = A,T,C or G
tgcctgttatttctcaccgnctgctcttctgacnctcttgnctactttccagnacattagtagntgcntgganaccagcaangttcacaagngagttgaccagactagccagagagacttntggctgcctggacngagaagagagctatatcaatnaatcctttacctaatca

SEQ ID NO: 301 - DNA, 292 bp, Mus musculus
  misc_feature (1)...(292): n = A,T,C or G
ctctttttacagcactggcccatccaggctnccagacngagctcagnctggnttctcacaatgngtgtntnactcctgggccactgccaaggcttaggcatgaaaacttgacatgcgggactggagagatggcttantggttaagagcactgactactctgccagaggtcctgagttcaattcccagcaatcatatggnggctcacaaccatctgnaaaggaatctgattccctcttcttgngcatctgaaggcagctacagngtacctcanacataaaataaatacttaaa

SEQ ID NO: 302 - DNA, 321 bp, Mus musculus
  misc_feature (1)...(321): n = A,T,C or G
ctcattatgcatatggctagggatggcccccacagacctcatgtgtttgaacaaacctatgggggccagtgagtacaatgtggtggtttgaatatgcttggcccagggagtggcactgtgtgaccctgttggacgaagtgtgtcactgttggggtgggcaaagagagcttcctcctagctgcctggggatgccagtctcttctggttgccttcaaatcaagatgcagaactctcagctccttctccagcattatgtctgcctggacactgccatgctttgcttnctgctgtgatgataatggactgaacctgtgaaactgt

SEQ ID NO: 303 - DNA, 252 bp, Mus musculus
ctgtgcatgcagtgcctgaaaagaccagaagagggcatcagatgccgttgattggaattacagacggttatgaggagccatgtgggtgctgggaatcaaacctaagtcctctgaaagagcaactggtgttcttaaccaccaagccatctcttcagcctccaggaatggtatttttgaggaaagtcaggcatgattctaaatgtaaaccttttaaattataactacttattatttttgtgaaaggaaaaaaaa

SEQ ID NO: 304 - DNA, 254 bp, Mus musculus
  misc_feature (1)...(254): n = A,T,C or G
gagggagagagaggggagaggagagggnaggagagnaggggggggggnaggnggagaggagagagaaagnnggagagggnggggagagaggggaggagagagaggagtagnaggngnagagagngggggagnggagngagagaggggagaggngggagaaggggnagggagggngnangagagangaggagagagnagngaggaggggagaggagngagagagaggggagagggnaggagaggagggagggaga

SEQ ID NO: 305 - DNA, 275 bp, Mus musculus
  misc_feature (1)...(275): n = A,T,C or G
tcttgctgaacctggattncatcaattctcctaaacacaagccctagggttcctttggtctctgccgttccagttcagagattacaggnatgnnttgataaacctangnntananntggncactgaagatctagaantcangtancncannctttgcacctatgaggaggcagaggcaagccagtctatgattttgaggccancctgggtccacatagtgagttccantacagtcaggactatnnaagagagaccctgcctcagagaaaaaaaaa

SEQ ID NO: 306 - DNA, 308 bp, Mus musculus
atgcattttgtagaagatttaggattcaatatcagcaaccatgtgacagtttagccatcagtaactccagcttcagagatccaacaccctcttctgacctataccaacatggtgcacatatagacaatcaaatagccacatattgtaataattctcttttagatttttctacgtttttcaagatagggtcttagtatgtaattctggctgtcctagaactccctatgtaggccagactgttcttcacctgcctgcctttgcctcccaagtgcatagtattaaaggcgtgccccactacaaaaaaaaaa

SEQ ID NO: 307 - DNA, 391 bp, Mus musculus
  misc_feature (1)...(391): n = A,T,C or G
gactgaggttctggcaaatcagtggtcctccactgacagagatctgcctacctctgccagctgagtcctgggattaaagccagacattgctatgcccagcttggcccttatatcttaaaaagaatcatggaaaaatgtaaaaatccagggacagcgagcaatatacgtattttacacactganaaacactgagangtaccctggagatacaaacttatggcagagcccgagttggcccccattgttgaatccctatggttgactgctgcagtgttctgttgggcagggtgtgatttttccttataatgttngaatatctttagaatcccaagcaaaaggtgttccatggaaaactggggaagcaaatggatccagagcaaacaaaaataaa

SEQ ID NO: 308 - DNA, 473 bp, Mus musculus
  misc_feature (1)...(473): n = A,T,C or G
acaggcatatcctgaggacaaatcgtctatgcacataggaatanaggaagcctgctgaacatgaccctggaagcaagccagtaagcagtgttcttccacagcccgtgtttcatttccttgcctggcttctctcacagaacactgaagccctttctttcctccaaaagttgctttgggtcactgttttcttgcagcacagagaagtgactaagacacttgcttaacatggtaaggcctgggctcaagcccctgcactacctacacattcacagnagncaaaaataaatgtgggggctggaggatggctcagtggttaagagcactggctgctcttccagaggtcctgagttcgattcctggcagccacatggnggctcacaaccatctgccatgggatctgactccctcttctggtgggnctgaagaaagcaaaagtattctcacattcatgaaataaatcttttaaaaaatag

SEQ ID NO: 309 - DNA, 308 bp, Mus musculus
ctgacatggtgattttctttgaagaaaaagacggcaacttccagaaatgagtactgtggtttagaaagaaagcacctgaccttgtggcgagagttcatcttgttctgttctacttaaaaagaaatacagaagatgaagaaagaaggaaaaaaatattccactgggtgatggtgatccatgtctttaatcgcagcactcaggaggcagaggcaggtggatccctgagttcgaggccagcctggtctccagagcaagttccaggacagccagggctacacagaggaaccctatattgaaaaaaacaaaca

SEQ ID NO: 310 - DNA, 173 bp, Mus musculus
  misc_feature (1)...(173): n = A,T,C or G
gaacattactctgtactagaagatgaccttgnacttnctntcctcctgcctccaacccctgagtgctgccattgaagccacagtccaccatagttcatactatgctagggattaaagcctggcctttatgtgtactatacaaacactccaccaactgagctataaaaaaaaaa

SEQ ID NO: 311 - DNA, 166 bp, Mus musculus
  misc_feature (1)...(166): n = A,T,C or G
tacagcttccaccgangagatgtttttttatgctttggtttttgntttgcnttgttttgtcttttgtttgtttgtgcgtcctttattgtgggnagaaaggtngactagagcnaagggnggatatgagggggcagggagatggaccgagattgggctcgtacgatga

SEQ ID NO: 312 - DNA, 242 bp, Mus musculus
  misc_feature (1)...(242): n = A,T,C or G
aactgatccggaatattagacacgtcacacaaaccctttaccactaaatgatgtgcctggntttctgtttttgaggcaagctggctttgagctcaccatgtagccaagaatgacctggaactcttggtttttggagacagggtctctctgtgtagccctggctatcctcgaactcagggatctgcctgcctctgattcctgagtactgggaataaaagtgtgcaccaccactaaaaaaaaaa

SEQ ID NO: 313 - DNA, 170 bp, Mus musculus
  misc_feature (1)...(170): n = A,T,C or G
ggctcagtggttaaggggcacttgcagctcttgcagaagtcctgggtttggtccccagcgcccacntagcagncncaactattcctanctccggtgccagagtctctgaaccctcctctggcctccacaggtaccaggcgtgtgtatggtgtgcagaaatgcatacagga

SEQ ID NO: 314 - DNA, 240 bp, Mus musculus
aaggaaggaaggaaggaaggaaggaaggatggaaggaaggaaggccaattaattttccctgccaggaaacatggcctgcaaactggccaccttgttctagcctgagcttggccttctggagttgcaccaggatgtagtggggtccagacctgatgaagaggcagtcagctgtagtgttttttcacaatactaaggatctttctagaacaaataaaaaggatgaagccaccaaaaaaaaaa

SEQ ID NO: 315 - DNA, 267 bp, Mus musculus
  misc_feature (1)...(267): n = A,T,C or G
cagctgatgggaacagatgcactagacccatagtcangcatcatgagttctgggagtctccgtggatgantcggngataggattgaaggtgccggatgggtcaagcacaccatannangacctacngagtcnactaacctgggtccatcgggcctcccngagactgaaccaccacccgaagagcgtgcnggggctanacctaanccctacacattnaaagcanataaatanctaaaaactnaattaaanaaaccctaacaaactaaa

SEQ ID NO: 316 - DNA, 365 bp, Mus musculus
  misc_feature (1)...(365): n = A,T,C or G
gtgcctgagatgcccagggctctgccccgcaggcagganatgcagccagcaaacctccagcttttcttttncaccttcaaaaactcccatagcaagcagggtttctctgtgtagccctggctgtcctggaattcactctgtagaccaggctgacctcgaactcagaaattcacctgttgggctggtgagatggctcagtngggtaagagcacccgactgctcttccgaaggtctggagttcaaatcccagcaaccacatggtggctcacaaccatccgtaacgagatctggcgccctcttctggagtgtctgaagacagctacagtgtacttacatataataaataaataaatcttaaaaaaaaa

SEQ ID NO: 317 - DNA, 193 bp, Mus musculus
  misc_feature (1)...(193): n = A,T,C or G
ttgacgcactctctacacatttntggctgtcctggaactcactatgnagaccangctggccttgaactcaccgagatctgcctgctattgnntcctgagtgctgggattaaagncgtgcctcaacatgcccaactaagaagaaagtttgtaaggaaagagctagtaaattgaaaatggctggaaaaaaaaaaa

SEQ ID NO: 318 - DNA, 275 bp, Mus musculus
  misc_feature (1)...(275): n = A,T,C or G
gcccatagaaggggagctgcaatacacgtcagacccacctattaattttcctctgaatctctctctttctccaacaaatgacatggatgggnnganntgtgnctanccctnnnncaaancgaganctgnttgccctnngaaggagcttcctgttcaannnnacngccacgcccactgctcngaacctgaggagccacacactgcgcaccnttctactggaccagagantatncggccgggaatcnggnaccctcccccttccttcataactggtg

SEQ ID NO: 319 - DNA, 216 bp, Mus musculus
  misc_feature (1)...(216): n = A,T,C or G
atgtatggtgtctggaagnccatccatgttgaanccaaagcacgatttcctctatcttatttgccttgtctgttttttgagacagggtctcanttancctggctagcctggngcttgatatgtagaccaggcaggcctggaaccgcaccaagatccatncacctgnntngnctcctcttnagngatggnaanaaagatgtgcaccataacgccaaa

SEQ ID NO: 320 - DNA, 176 bp, Mus musculus
accacattaattcctggcacctagagggcagctcacaatgacctggaattccagctccaagacatccaatgccctcttctggactccatgggaactgcactcatatgtgcacaccgtcctttgccccacaagtacatccaatttaattaaaaattcttagctgggaaaaaaaaaaa

SEQ ID NO: 321 - DNA, 306 bp, Mus musculus
  misc_feature (1)...(306): n = A,T,C or G
accgactgaggaagcctggngctcacctnntgactctgnncgnactntngngaaaagccntntgaggcaaangtggaggcccnacttatnctttcatncaggnggccntgncntaaatnctccncnctagatnaaccaggtgtgtnggcatataccttgncctcccagcacttgggagacananacagaaggaccatcatcacgatcatccccagcaacagtgccagttcaagtccaacctgggatacataagaacttgcctcaataaaaaattaataacaataaattaaattaaattaaaaaaaa

SEQ ID NO: 322 - DNA, 214 bp, Mus musculus
  misc_feature (1)...(214): n = A,T,C or G
ccaccaccaccaccaccatcatcgtcgtcgtcgtcatcaccatcatcatcgtgtgtgcatgtgtcacagtgtgcaaatggagatcagaagacaattctctttttcctgctatgcgtcataatccagngctgctggncngncgannactactancctncangctntcctnctanactcaatgctgctcaatgatcttnccctgcacagcccatac

SEQ ID NO: 323 - DNA, 291 bp, Mus musculus
  misc_feature (1)...(291): n = A,T,C or G
ctttgggcccatggctgnctntgactcaccatangnctntgangagtgcagtgacatgnnataccaacagatacattttttnaaaagcangganagttatcntggngccnngagcnngntttggnctncttaagttctcttctccttcttctcctttttcttctctttttcctctttctcctcctnctcctcctcctctgcagctttccagtctgtcctgacatgtacacacccattctgnagtccacctatagatggcccattagcatagagacaatatgagggagggat

SEQ ID NO: 324 - DNA, 117 bp, Mus musculus
  misc_feature (1)...(117): n = A,T,C or G
tggtctcaaggtgagttccagatcagccangactacacagagnaaccctgtctctgaagaatgaagaagagaagaagacgaggaatancaagaagatncccaccaccacacttaata

SEQ ID NO: 325 - DNA, 174 bp, Mus musculus
aatggcgtaacaggtaagggcacctggagacaagcctgatgacctgagttccagcctcaagggcagcatggtggacggacagcacgcctccaacttgtcctttggcctacacaaacacacacaccataacatgtacattccacacacatacctacacacatacaaaaaaataaa

SEQ ID NO: 326 - DNA, 270 bp, Mus musculus
tcttggcgtccagcaccaccgcctgcttgtctgccatgatggtcatagattcaccccaaaccctaagcaagcctccgataaaatgcattctcctacatgctgccgttgccatggtatcttatcacagcaatagaagagaggtactgtaaatattcagaggctttataagcatgctggcccctatactaacattacatgtatcattttcagcaattgtcgtcctttaaatgtgtacagcccaaagtcaataaaaaaattgaaaaagtctta

SEQ ID NO: 327 - DNA, 275 bp, Mus musculus
  misc_feature (1)...(275): n = A,T,C or G
aggtgcagagctcactccaactgccagctcactgcagaggactaaggtccgggggacttgaagagccaggcacgtgtagggttatggtaaactctgaaacccacaaaccatttagttcagaggaccccgctagagaatcttcaatttattttattttatgtatatgtatnnnacctatgtgtatntctctataccntgtgtgnctctgctncccatggatgtcaagagaggattgagggctccctggaagtggggagctgacatgtgggtgctga

SEQ ID NO: 328 - DNA, 292 bp, Mus musculus
cccgacctggaatacaggtggctgttccctgcctgggatggctactgggaactgaatgaagcactaaaaccactgagccgtccctccagtaccagtgattaacactagctgctcttccggaggaccaagatttgattcccagcacacacatgatggcctacaaccttccatcaactccggttccagggatcgcacaccttcttcttttagcctccatgtgcactgcattcacgtggtacacagccatatatacaggcaaaataaaatgctcatacacacaaaaaataataaa

SEQ ID NO: 329 - DNA, 160 bp, Mus musculus
  misc_feature (1)...(160): n = A,T,C or G
acgcccaatcatgcaggccacatgagccttaagcctgaagattcaaagagagaccctatctcaaaaaacaaaacggnaagtgactgagaanacaccaggtgttgatcccctggcctatacacacacacncacacacacacacanacacacacacacacac

SEQ ID NO: 330 - DNA, 246 bp, Mus musculus
  misc_feature (1)...(246): n = A,T,C or G
tgcgtcgaaggtgatgccgctctgtttctaccaggagaatntcanaatatnnttgnanactagatgccnagggaantggngagatggctcatcggttaagagcactgtntgcttttccanangtnctgagttcatatcccagcaaccacatggnggnctcacanccaactgcaatgggatctgatgccctcttctggtgtgtctgaagaaagctacagtgtactcacatacataaaataaaaataa

SEQ ID NO: 331 - DNA, 215 bp, Mus musculus
tctacgttcttagttctatggtggcttgcaaccatttataactccagttccgggagaccagatgctctcttctgacctgtgcacgcaccaagcatgcatgtggtacacatacatacatgcaggccaaacactcaaacacaagagaataaatataaacaaaatagtacaatttaaataaaccataaataaaaccaatgagttaaaatttttaattt

SEQ ID NO: 332 - DNA, 242 bp, Mus musculus
gtgtcggatcccttggaactggagttacagacaattttaagctaccatatgggtgctgagaagagaattgaatcttggtcctctggaagagcagccagtgttcttaactgctgagccatctctccagcccctttatatcacttcctaaagatgatttgattggctcttgggtttaccctggggtggagcatggtggctgattagtattaataaatatattttcttcttcgtaaaaaaaaaaa

SEQ ID NO: 333 - DNA, 303 bp, Mus musculus
  misc_feature (1)...(303): n = A,T,C or G
cccacaggccaatccgatagaggccacatttccactgagaatcaatgtacccaggtgtgtcaacttggcaactgaagctgtaagagagcacagaatccggagtgactctattaaaangagnnnccttgttggaggaaatgcntcactatggggggtaggatttgagggctcctagtgctcaagctccacatccccccacccctaaaagtgcagtctcctnggaggcattctgatcaagatgtagacttttcctgcaccatgtctttcctgaatgtgtcatgcttcctgccatgatgataatac

SEQ ID NO: 334 - DNA, 153 bp, Mus musculus
aaggcttcaaacctacaggaatctgcttgtcttctacattccaagtgctgagattaaaggtatgcaccaccaggcctggctctgaataacttactcctaacaaataaaataatgaagtgtcattagaaggactgaattatacagaaactgtac

SEQ ID NO: 335 - DNA, 328 bp, Mus musculus
  misc_feature (1)...(328): n = A,T,C or G
accattcctcctaagancaanctgtnatgcactggcctcgatctgtggaaagggctgctggagttagntggcngnttgcataatttcctctgccttctcggctcacatncaaggatgccacatgaggaagatgtagaaccctcagctctgcctgcaccatgcctgcctggatgctnccacgctcctgtcttgatgataatggactgaacctctgaacctgtaagccagccccaagtaaaggntggccttatnagaannntacatgaaaagtnggngttgtgccctcccttngantatcttgagtgattaannggcctgaaaagagaat

SEQ ID NO: 336 - DNA, 445 bp, Mus musculus
  misc_feature (1)...(445): n = A,T,C or G
aaggagagctgaggacatcngccaggggagcagccacagcttnctcccagccaaaacctgcanagaaggctgccccgggccttctagnataccaggacacaaantnctcancttcctccagctttaaccttggctggaccacccacataatgatgagactgtgacagtganccccganggtnaagntgtgnggtgctgctcaacttgcatttatttggngctgngattataccggcanattggaaaacacaaggnggntangccaantaccgnatgaangaacaactgcatngcccttaacacctacngcgccccaaaggctgnnggntgntgacggcttattnatttatttatttattnatttaaggnaggntntttgtanatagccctggctgttctggaattnactatgtaaaccaggttgccctctggaattcactacata

SEQ ID NO: 337 - DNA, 371 bp, Mus musculus
  misc_feature (1)...(371): n = A,T,C or G
aacgatttgtaataaaacacanggcctccaggcctccagcaggaagaaggcagnacccatngtgacatcacatgtctctggaccggnccgagctgngccgtgtaagggcgtgtcagcgaaggctttgccctgcctncggtgacgntacggcccgncgaagctctantatctccccgccgctctcancgatcgccnnncgcggtggntcacgcctgtantcccagntactcgggaggctganacaggangatcgcttgagtccaggagttctgggcttgtagngcgctatnccgatcgggtgtccgcactaagtttggcatcaatatggtgacctnccggtgagcggtgnaccaccaggttgcctaaggagg

SEQ ID NO: 338 - DNA, 459 bp, Mus musculus
  misc_feature (1)...(459): n = A,T,C or G
aacatgagcatgtcttatgcttattctcccgagcatcctttcaagctaagaagagcccagctagacagcttcctgactggcctcacagggcatattggaaaggagtgtatcaggcaataaagactgctgagacatgccaaactgcctggaaaaagcatgagttcagaagcctggaagaagcaaagaccagccnagcngcttacaagaaacaagaaccagcctagctgccaggaagaggctcacacaatggaggcatgcagaactaacaccctctgacctattgagctgcctgcaggctgtgcagtgggccccaggttcccagtttttgtgagctgtcaaccatgggggctgtgggagggctttggtgatggatctgtctttgagtcatttccgctcctgtaagtaacctcacatttgtatttctgtaagtaatctggataaacctcattggtctaccaa

SEQ ID NO: 339 - DNA, 156 bp, Mus musculus
aggatcaagtttgattcccagaaccacatctgatgaaaccacaaccagctataactccagttccagggaattctgcactctcttggtactcataagcacccatgctctgtgcatatacctgccatatacacagaaataaatcttttttaacataaa

SEQ ID NO: 340 - DNA, 156 bp, Mus musculus
aactgagaattgaaagaagttcttatttttgagatgacctcactatattggtctgactggcttggaaccggacatgaaggtcattctggccttggactctcagacatctcatggcctctgtttcccgagtgctgggattaaagatgtgtatcacca

SEQ ID NO: 341 - DNA, 468 bp, Mus musculus
  misc_feature (1)...(468): n = A,T,C or G
atgaagcctgcactggcctnnaactctatgtagtaccttganttcctgaccctcctgtcttcccctcctgagttngaggattacagacacagccattatgtctgatgtncgnggngctgggcacagaattcatgatgtcctgcgtgccgggaaggctctctaccaacagagtcacatcccacagcctcgggggaacctcttgacctcttgaatactgagatcacatgcacgatcgtgctcagcgacccggctggatttagaggtaaatgagatcattatttccaagtcagagaggccaggcaagatacctcagtgggtcaaggtgcttgccaccaaggctgaggacctaagttcgatccctggggcccatacagtggaaaaagagagcggactccagcaagttacatcttctgtccccacacacatttttatagcatgtacaacttcccataggcaaataaaataaaa

SEQ ID NO: 342 - DNA, 184 bp, Mus musculus
gggggccggacaatggcgtcagatgcccgggaactggagtcaccggttgttgtgagccaccatgtggatgctgagagtggagctcgagtcctatggaagagcagcatgcgctcttaaccaagagtcgtcactcctgctccatgttatacaagttaaagtatttgtttgcctgtaaaaaaaaaaa

SEQ ID NO: 343 - DNA, 129 bp, Mus musculus
  misc_feature (1)...(129): n = A,T,C or G
ccaccatgtggatgctgagantggagctcgagtcctatggaagagcagcatgcgctcttaaccaagagtcgtcactcctgctccatgttatacaaagttaaagtatttgtttgcctgtaaaaaaaaaaa

SEQ ID NO: 344 - DNA, 188 bp, Mus musculus
gaacatgagaggtgcacccctgtgatcctggcgtctggatgatgaaggcaagaggagcagaagcttaaagtttcttgactgtatagcaagttcagagccagccagggctatatatatatatatttatacacacacacatgtatatatatgaaaatataaaaatatgaagaaatatataaaaaaagaaa

SEQ ID NO: 345 - DNA, 182 bp, Mus musculus
  misc_feature (1)...(182): n = A,T,C or G
accaaaggaaccacagacctaagtcttcaaaacctacagcagtctcgtgcatgtgtaccaaagttggaagaaaacaagatatcctgagaagatgaatggaaaataagctttgattcatcaaaataatggaatattacttaagactcacangaaatgaaatattaacccatgaaagaacataa

SEQ ID NO: 346 - DNA, 115 bp, Mus musculus
gaccttcggaagatcagtcagtgctcttacctgttgagccatctctccagtcctatatttaaatattttacataaagctaataaagactttgatggctagagtcaaaaaaaaaaa

SEQ ID NO: 347 - DNA, 241 bp, Mus musculus
caccgaccgctgtatccgagcaaacttgacgcacggaggacaaaagcagctacctaaatggaggaactcaagagaggaagccggaagtcagagtcggaagtcagagcagcgactgaggtggggggcagctcctgccttcaagttcctgccctgtgtgagctcctgtcctgacttcctttggtgatgaacagcaatgtggaagtgtaagctgaataaaccctttcctccccaaaaaaaaaaa

SEQ ID NO: 348 - DNA, 249 bp, Mus musculus
  misc_feature (1)...(249): n = A,T,C or G
aagatctgtgtgaatgaanaacacttagctaccctccagcaccatgcctgcctacatcctgccaggaagataacggaccaaacctctgaaactgtgagccagccccagctaacatgcttgcttttataagagttgntgtggncacagtgtntattcgggacagtnnnacagngactctggacacatactatcaacagatctacaccacaggaaatagtaagggaaggtcttcatataaaagaaataaaa

SEQ ID NO: 349 - DNA, 100 bp, Mus musculus
  misc_feature (1)...(100): n = A,T,C or G
aagccctgtttgcattncctggaggaacccctcanccaagctgcatnctaacancatngtgatggaggcgtggagtagncannggatgattgatctggag

SEQ ID NO: 350 - DNA, 362 bp, Mus musculus
  misc_feature (1)...(362): n = A,T,C or G
aacgtgcagcacaccaccagaagngnttcagtgtgtttctctctatggcgtcctgataaangcagcatcagctatgcagngtaaggaggacctgnacatgcatgtngctagcaaagagtncttnatcatgtgtccttccatgtgnttgctttagcagaacatcctctctcctgngnctgcttcagcaaaaccttccttcacctgtcttagtctttcacctgtgtccacttcacgaaaacactccacaggtttgccccagcaaaacaccgtctgacacagctgactttccaaagaacccttaagtttccacttcatcccatgtctgctggatctttcttgagactcccccaaaagaaagaaaa

SEQ ID NO: 351 - DNA, 292 bp, Mus musculus
  misc_feature (1)...(292): n = A,T,C or G
aggaggcagcagagaagctgactattcaccctggctagtgtctcactgtcctctgggcttcgaagaggtatggccggaggaagtaaaaggctctttgggggctggtgagatggctcagtaagagcacccgactgctcttccgaaggtctgaagttcaaatcccagcaaccacatggtggctcacaaccaccggtaatgagatctgatgccctcttntggtgtgtctgaagacagctacagtgtacttacatataataaataaataaataaactaaatctttaaaaaaaaaaa

SEQ ID NO: 352 - DNA, 305 bp, Mus musculus
  misc_feature (1)...(305): n = A,T,C or G
ccacgccctacccttctnccatctntacccttgngcttgcncccatcctncatccatganggnatgtanggggggcaattactgtangngaagctgganntggngacagaggacagggctttttcnttaaagncagactcttgcttaagaatccccggggccgggcgtggtggcgcacgcctttaatcccagcacttggttggcagaggcaggtggatttctgagttcgaggccagcctggnctacaaagngagttccaggacagccagggctatacagagaaaccctgccttgaaaaaaaaaaa

SEQ ID NO: 353 - DNA, 454 bp, Mus musculus
  misc_feature (1)...(454): n = A,T,C or G
ggcatggtgacaggaacagctgagatctcacatcatcatctgagaacaganggnngagngcacactgagtggcgggaggnttctgaagctaagtcggnctncatggcacatctcctccaacaggaccacaccttctaatncctcctgaacagttntaccaactggggatcaagtattcaaacctttgagcctatgagggccattctcantcagacaactacagtgtcttagccacgttagttttctcaactcacanaagtcagacacaaagtcatattgaaatgccaagtcctagttccctctttcatcccgttcatgccaaatcatgccactttggcataaagattatcttgaactgaaagcaactgagcagaaccatgtataagaaaaccgcttgccctcccattgnctgnacaaaggcaggagggnttcaaggcatcctcccacccctttc

SEQ ID NO: 354 - DNA, 100 bp, Mus musculus
  misc_feature (1)...(100): n = A,T,C or G
agggttcccatcaccatggganacccacggctcaaccattctttggacgangtcgcacanntcctgtntataaacatgacctctaactagaaaaaaaaaa

SEQ ID NO: 355 - DNA, 364 bp, Mus musculus
  misc_feature (1)...(364): n = A,T,C or G
ccgcaatcactccaacngcccagntgacaggngttcttncgactnttgnnagaggacctgcgttcgattccccgcacctatatcaggacgctcacaactctntgtnnctnaagatccaaggatccancaccctggtctggcctttgatggtnccagcaagcatatggcttatacttacacncatacncacatacacacntacacacacntacacncttacacatatgcacacattcacacaaacatatgtacacattnacacacatatatgcacacattcacacacacatacacacattcacacacatagacacangcatacacatacacatgcaaataaataaatgtaaagagttagacacaa

SEQ ID NO: 356 - DNA, 154 bp, Mus musculus
  misc_feature (1)...(154): n = A,T,C or G
actattaacaacctgctgactgctgactgccacataggcttctgtaaganctacactgttcactccacactgtgggtttagaccagagtttctcaagcttcacaatgctgagaccctttaatacagttcttcatgctgtgctgaaaaaaaaaaa

SEQ ID NO: 357 - DNA, 178 bp, Mus musculus
  misc_feature (1)...(178): n = A,T,C or G
gatgtaactgcaatgtggcgctagaaaattaactctgggtcctctggaagatcagtaagngttcctaactgctgagctctcgctccagcgtcagacttgtgtttcttacactcaagagtaacttagcatttatgtcctttcacgggggnnagcatggtatattgctgaaaaaaaaaaa

SEQ ID NO: 358 - DNA, 179 bp, Mus musculus
gggatggtgctcccatagtaggctgaaccctccaataccatcggtcacaacagtctttcacagcatggccacaggccagtctaatctggtcaagtcctcaactgaggctctctcttcccagatgactctaacttctatcacgataacaataaactcacctggcacctacaaaaaaaaaa

SEQ ID NO: 359 - DNA, 128 bp, Mus musculus
agaggtcctgagttcaattcccaggagccacatggaggctcacatcccatccatctgtagtaaggtctgatgcctgcaggtatccatgcagatagagcacccatatacattagataaataaaaaataa

SEQ ID NO: 360 - DNA, 186 bp, Mus musculus
  misc_feature (1)...(186): n = A,T,C or G
cttgatcacgtaaagaacagnccnnannatggannngntgcccaccttggacaacttcatctgaacctaagaaaacctactgtgatggttngttgaccagggagcggcactatttggaggtgtgtccttgttggagngggtgtggccttgatggagnangtgtgtcactgggggcttgggctttaa

SEQ ID NO: 361 - DNA, 258 bp, Mus musculus
  misc_feature (1)...(258): n = A,T,C or G
gtgactcacacaatttgtagacaagcttatcagaggagtaaagtcagtgcgaattttgcagtctatctttngncaacaaatgcacatttgcacctttnatnaaacttttttttttttttntnggnnagnnnaggcggnncanaagggtaagancaangaggncctgggntcaaancccaccncgtacatggngactcacgaccatctgcgngggggatccaatgccctcttctggngtgnctgaagacagctacagtg

SEQ ID NO: 362 - DNA, 168 bp, Mus musculus
  misc_feature (1)...(168): n = A,T,C or G
tgcctgggcagaggccntatttacttcttntggtactttcacaggtcttacangaggcatggcgtggttncatatntaagnacagnnacaannngcnccgtcnctctattctcnaagatcatgctagctnggaatcgggtcccctcccctttccttcatacctgggcg

SEQ ID NO: 363 - DNA, 436 bp, Mus musculus
  misc_feature (1)...(436): n = A,T,C or G
cttgatacacgaactggacaaaangacgtgccttggcagcctaaggaggagcntctggagacaggccgcatcctcaaagaatctcaaagataccatgcntgagaaaagggagcacttgggaaacagcacctcgtgtgaccttctggaactggatttctctgnatagccctggctgttctggaactcacaatgtagaccaggctgaccttgaactcagaaatccgcctgcctctgcctcccgagtgctgngataaaaggcgtgcaccaccacacctggctcacatatgaatttctaccttacatttgtattgaaatgngtatgtacctatacataaagatatacatanataaaagntttctcctagagaaggaacaaggctttttctgtacatccctaagnagaacctggcntaaantgtcctccaacaaaggttca

SEQ ID NO: 364 - DNA, 202 bp, Mus musculus
  misc_feature (1)...(202): n = A,T,C or G
cacccccacgccccatctgctcattgttttatgcancaagatggttcagagcatctccctacgctgggacatcaagcctgcctcccctcccattgatgtcagataaggccatcctctgctacgttccgactgccgagggaatccaggcggaaagaagtggatagatctgctaaagacctgaggagaacacgaggacctcact

SEQ ID NO: 365 - DNA, 286 bp, Mus musculus
taaagcatctgcatacagacagacacctgtgctggatgctggggacatgtccccaacctcatggaacacccagtcctgaggtatagtgaggtataggtcagcaacctgccgtgggtcactgaaagaaccacagtagctagcctcccgtggtggctcacacctttaatcccagcacttgggaggcagaggcaggcagattctgagttcgaggccagcctgatctacaaagtgagttccaggacagccagggctacacagagaaaccctctctcgaaaaaccaaaaaa

SEQ ID NO: 366 - DNA, 175 bp, Mus musculus
cttgtgtaagccctggctgtcatggacctcactctgtagaccaggctggccttgaatttacatgagatccacctgcctccttctctagagtgctgggattgaagcaccactctggctaattacttctttgtaaataaacttgcacaaacgtcaccaccacacacacaaaaaaaaa

SEQ ID NO: 367 - DNA, 370 bp, Mus musculus
  misc_feature (1)...(370): n = A,T,C or G
tccgtgggaatcgggaagcntnnaccacttcctttgttacnagtgtgcnaacaatataaatttgagccntgatcacccatgnaaaagagtcacagagnngctnggagctgtgncnaaaggatggaccatctaaagactgccatatccagggatccatcccataatcagcttccaaacgctgacaccattgcatacactagcaagattttgctgaaaggacccagatatagctgtctcttgtgagactatgccggggcctaacaaacacagaagtggatgctcacagtcagctattggatggatcacagggcccccaatggaggagctagagaaaatacccaaggagctaaagggatctgcaaccctatag

SEQ ID NO: 368 - DNA, 240 bp, Mus musculus
  misc_feature (1)...(240): n = A,T,C or G
agactgcctggtctggaacangtgccacactccccacagaaggaaacctgacctctggtcatgtaagcccagaacagagttctctatgctaatgaggtacctagaggccctgagggctcatccaataagcttcccttcccagacatctctccttgaaaaaggtatttaatcttgggtcagaccctgaggaggagatatgaacagccaatgaatgatattaaatacataaatacaaaaaaa

SEQ ID NO: 369 - DNA, 273 bp, Mus musculus
cagtgcatgggacagactccaagactttgtgtgtactatgcaagctttctacccaccaagtcccatctcagaccctcttggaaaatacaagtttggggggctggtgagatggctcaccgactgctcttctgaaggtcctgagttcaaatccaagcaaccgcatggttgctcgcaaccatccataacgagatctgacaccctcttctggagtgtctgaagacagctacagtgtacttacagatattaaataaataaatttgaaaaagaaaaata

SEQ ID NO: 370 - DNA, 327 bp, Mus musculus
  misc_feature (1)...(327): n = A,T,C or G
ccctggaaacctgatgccttgnaagccangtgatggaaggagagaagggaatcgtgcaagttgtcctttgacctacactgtnaagcctgcatgtgctcctgtgtgtgggcacacacacacacaccngataannagantgaatacatnagatacantatgactttganatgnatgatcncataanaatccgnttttattttatagaatgtttttatngaaatattttatgaaagttgtagtacattaatagtatactcttattctttaaattccatctaatacgtttgtattagcatgattaaaactggctgttcattaaaaaaaaaa

SEQ ID NO: 371 - DNA, 474 bp, Mus musculus
aacccagatatgagagctgcaggccggccccaccagtttggtttctcttgctgactaaaagcaacttgaagaagaagagacttgtttcagttgagctcacagtcagtcgttaagggaagccaggacaggagctagagacaggaactgaagcagagacatggaagaacgctgcttgctggcttgctcaccctggcttactcagcctgcttttttctacaacccaggggtgacatcacttggtggtctgcaccctcccacataaatcatcaatcaagacgttgcccccaggcttcctaccaggtgacctgatgggaacattttctctcgagggtcctcttcacagatgactctagcttgtgtcgagcccacagaaaaactaaccaacacacccaggctggcctctacttggctgtttggtagagatggccttgaactcctgacctgtctgcctcaacctcccaggttcatggcttg

SEQ ID NO: 372 - DNA, 245 bp, Mus musculus
  misc_feature (1)...(245): n = A,T,C or G
aaacaaatgagagaagagaagagaagagaagagaagagaaganaagagaagagaagagaagagaaganaagagaatagaagagaagagaagagaagaatccnnacattgatggtgatggtgcacatgtttagtatcagcactcttggaggcagagacaaanagatctttgagtgcaagactagcctggtctacaaagcaagttccagaactaaacagagaaaccctgccttgaaaaaaacaaata

SEQ ID NO: 373 - DNA, 363 bp, Mus musculus
  misc_feature (1)...(363): n = A,T,C or G
tgaggacctacctggngcagcaggggacggcttcattggaatgtgcacaggaggcccagctgggcatccctttcagagcatctgtggggcatgagaaagagatatgaagccttcttggactcaagacgtctttaccctcttcccggaaggaggaaaggactgggactagggctcagggggatggctcagtaggtaaaggcgtcctctgccaagtctgatgacctgagtttgatccctggaacccatagggtagaagaagagaaccaactcctacatctcgtcctctgacctctatgtgtgctgggatatgtgcctccaagaaatgaaatgaaaaagatcatggattaaaccaggaaaaaaaaa

SEQ ID NO: 374 - DNA, 136 bp, Mus musculus
  misc_feature (1)...(136): n = A,T,C or G
gacctttcaaaatcatggaaattgatnngncanaacttgntcacctcttagaacaactatgaagatgcttggacganngctgcaggatatctgatcacactgtgaatcccaagatcgtcaaatttactgaaaaaaa

SEQ ID NO: 375 - DNA, 164 bp, Mus musculus
catagagggcttcaagacgcctccatctgaaggaacaggctgtgcaatgcttcacatggattctggaagaacatcaagcactcttaaccactgagccatctctccgacccctgaattttcatgtactagctttctggcattgtgcttgttcattaaaaaaaaaa

SEQ ID NO: 376 - DNA, 225 bp, Mus musculus
cttagttatttagttattcattctatctaattaagtttcctgaaagaagagctcgtgagttatctcctagacaaatgggcactgtgacaccggagaggttcaattcccagcaactacatggtggctcacaaccatctgtaatgggatctggcgccctcttctggtgtgtctgaagacagctacagtgtactcatacataaaataaataaatcttaaaaaaaaaaa

SEQ ID NO: 377 - DNA, 267 bp, Mus musculus
  misc_feature (1)...(267): n = A,T,C or G
aagggacatgagaaaggtcaaaagccagacatttcccagctgatttacatctcactggctgagaggcaagaatcctagcacagctgatcaaactgcttgcgaaggatctcatgaacaatatgaaccacgcttacagcactgggaccaaaggtgtgcgccaccacacctagcacagagcttncttttaaaattattttcacattcacnngnatagtttngagggngtgcgtgcncatgtgaaggnggatgtcaccggtcaatgcaaag

SEQ ID NO: 378 - DNA, 401 bp, Mus musculus
  misc_feature (1)...(401): n = A,T,C or G
tgggtgccggcatgcctcctgctgtnggggacnntnattcntctgganctatannnccattaaactcctncatttgggaataganannntangntaaaaggcattnggggcttgagagaatcccatganggaacctaccagtgtttccagaacttatctgccattcattattagaaagctttagccaagtcccttcgactaccaggactctaactacatgataaggtataacccattgttaagtggggaccacaaaatgggatctggcatgcaagagactttttattttagaaggtgacttttnttgggaggcagaggcaggnggatttctgagttcgagggcaggntgntctanaaanngagtnnccaggacaggccngggctatacaggagaaaccctg

SEQ ID NO: 379 - DNA, 387 bp, Mus musculus
  misc_feature (1)...(387): n = A,T,C or G
acatgaggatggtgaagcaaaaagggggcacagcggaagctgagcatggagatcngncctcttgctgatcccagctaatctggcctgacccttgtctttcaaaccaagcaaaggaagcaagtgaccttttagcactgtttgtcaccaagaggatcctggagcangttgcctcacccccacccccgacccccacccacgnctccagcctgaccaggggntcatgtgtcagaaactggatgnggaagccaggcaaggtggcacacgcctttaatnccagcactcgggaggcngaggcaggnagatttctgagtntcgaggccagcctggtctacagagtgagttccaggacaaccagggntacacagagaaaccctgtctcaaaaaaca

SEQ ID NO: 380 - DNA, 322 bp, Mus musculus
  misc_feature (1)...(322): n = A,T,C or G
acctcatgagccattggattcagttgnnaccaccctatctcctcagantttagncctaccaaaaganatcagccttcttcaangaaatggttggtctccggatctaagacagggaaattataacgatangcctaaaatatcttaaagtgttcaaagaattatatctattctatcaaaggagcatanaaacaagctggaaggagctcccattggctaaatctgggacaatttgaacatggaaataaagatagtaacagggtataacacactgcctaaaacagggacccataaatgcaatgacataaataaattaattaattca

SEQ ID NO: 381 - DNA, 294 bp, Mus musculus
  misc_feature (1)...(294): n = A,T,C or G
gatgaaggtaaaagaaagagaggctggctatggccacagtggagagaagggaggaagggaaggagaaacagagctagagatgagagtaagaaaggtgagagcttaagacaactatttcttttttaaaaatttaattttattaggnatttgagaatggtatgtgatgtattttaatcatattcacctctaacccaactcttcctagatgcaccccttcttttctacccacccactcaagcttgtaccttctgtttctttttaaaccattaaatctagttgtgctaaaaaaaaaaa

SEQ ID NO: 382 - DNA, 195 bp, Mus musculus
gaggcagaagcagtctgatctccaagttcgaggccagcctggtctacagagtgagtcccaggacagccagggatacacaaagaaaccttgtcttgaatgccttcccccaacaagaaagaataccccaactagcccactctacactgaagagacaactcagcattaaagagcacagtagttcctacaaaaaaaaaa

SEQ ID NO: 383 - DNA, 100 bp, Mus musculus
  misc_feature (1)...(100): n = A,T,C or G
gtttcagcaaagcctgttcattcagaagataaagactgaacanatgggaaaataatgtagaaataaaagggaaagtgacagaaatggaaaaaaaaaattt

SEQ ID NO: 384 - DNA, 271 bp, Mus musculus
cttcacccgtggctagtgtctcacctgtcctctgggcttcgaagaggtatggcaggaggaagtaaaaggctctttgggggctggtgagatggctcagtaagagcacccgactgctcttccgaaggtctgaagttcaaatcccagcaaccacatggtggctcacaaccaccggtaatgagatctgatgccctcttctggtgtgtctgaagacagctacagtgtacttacatataataaataaataaataaactaaatctttaaaaaaaaaaa

SEQ ID NO: 385 - DNA, 100 bp, Mus musculus
  misc_feature (1)...(100): n = A,T,C or G
gggtggagtttatgcanagcctgttcattcagaagataaagactgaacaaatgggaaaatantgtacaantaaaaggganagtgacagaaatggaaaaaa

SEQ ID NO: 386 - DNA, 343 bp, Mus musculus
  misc_feature (1)...(343): n = A,T,C or G
aactgagatatgcttaccaccaaaacgtncccttgtggagncatccntnctnancaggggaacctnncacgtgtggaaagcgggcaggngaagactccaaanagatcctaccctcccaagggcatnttnaggagccaggctcttcacttctgtgctcattcagtcattcaacaagtccccaccaacaacaactttttgtttntctgtttattttgagacanggtttctctgtgnnggggggnggnttttctgaaacccactctgtaaaccaaggttggtctcaaactcaggggtctgcctgcttctgcctcccaagggctaggattaaaggcatgcaccacca

SEQ ID NO: 387 - DNA, 242 bp, Mus musculus
  misc_feature (1)...(242): n = A,T,C or G
aactgaggggctggagagatggctcaccacttgggagctactggtngcnannncgaagganctgannanaattncgaganaccactnngatggctcacaaccacctgtaatgggatccagtgccctcttctggtgtgtctgaagacagctacagtatattcatatatataaaataggacctggatttcgtttctagcacccatatggtggcttacagtggcctatacctccaaaaaaaaaaa

SEQ ID NO: 388 - DNA, 215 bp, Mus musculus
gtttaagagctttggctgctgctccagacgacccatgtttgattctcagcacccacatatcagctcacaaccttctgtaactcctattccaggagatctgacacattctttcggccgcattctttcggcctctgaaggcacaaggctttaaatggtgcacaaatatacagataaaaacacatatgcataaaattaaaatttaaaagttgatctta

SEQ ID NO: 389 - DNA, 482 bp, Mus musculus
  misc_feature (1)...(482): n = A,T,C or G
ggtcgcacaggaagcatggcgtggttccatagaanaacngntaaaccctaaacngaacntctgcatcnccctctacaaagctcataacctaagaggaggcaaggaagaacatagagactggagaatggggaggagtctgtgaaatgcggatctggacatgacatggccgttgtactcttgaattcactgcagctatggttgcctgtacaagatcaagccagccaacattccagaatggatnggaaaggatgcatgaggctctgcccctacctgaggagtgattggcagtccacagctgctaagagaggggaatcatttttcttcaggcttgtgaccattgtcagactctgatggatggccccaaggcctctagcaggagggcaacactaactggacttagntataaaaggaagaggaagaggaagagggaaagaagagatgtgggctgaagaaagacatgttggaggaatttgggggtagtg

SEQ ID NO: 390 - DNA, 401 bp, Mus musculus
  misc_feature (1)...(401): n = A,T,C or G
ggagaggggacacaacanttnactcataccacgcactcatntatanacngatgnnctttgtaccttnatccacncacnctactcanatgacnntgagaggatcnnctctacatgnagattaactcattnttntctcttccccacacnatcacaatncntngggggaccattngatattgnaaacnaccgactgaagctctccagacctnaggttccccattcatactatggagcnaacaagattatctatatctaatggaccaagatggctcagggggnaaaagtgactgatgtcaaccctgatgacctgtcagagntggatttttcagactcatgcggcgggacggncagaactgactacangnaggccgggctctggntccttgcatgccccatgacat

SEQ ID NO: 391 - DNA, 684 bp, Mus musculus
  misc_feature (1)...(684): n = A,T,C or G
gtaaatcacggtgtgatggtttgtatatgcttggcccagggactggcactattaaagggtgtggccctgttggaataggtgtgtcactgcggctgtgggctttaagaccctcattgtaactgcttggaagtcagtattctgctagcagccttcagatgaagatgtagaactctcagctcctcctgtaccatgcctgcctggatgctgccatgctcctgcttcgataataatggactgaacctctgaacctgtaagccagccccagttacatacaagttgtccttataagacttgccttggtcacggtgtctgttcacagcagtaaaccctaactaagacatagggtttgcttgttcgtttaaatcaatactttcgttctgaaagacgtgcctattgctgcgtatttattgtgtctagctttatcactcttgaccaaatccttccagaagagagtacagcatgatcctcagaaaatacattggagctccagacaccctgagtcagaaggagtttctgggttcaagaagacagaacaatttagatctcatttattaaggacgctgtggaaccattacataagcagcccgtgtgattgtaatanccgacgtttcattagctctgattgttttttgagagaaagcnaancattaaaatacngagatnttaaaaaggttaaaaaaaaaa

SEQ ID NO: 392 - DNA, 306 bp, Mus musculus
  misc_feature (1)...(306): n = A,T,C or G
cacttcacaagaggcttttgancccgaatctttattatantgngacgagagtaaagctgggggctgaagagatggcagcggataataacactgactgctcttccagaggtactgagttcaattcccagcacccacatggtggctcacaaacatctgtaatgggatctgctgccctcttctggtgtgtctgaagacagatagagtgtacctcatatacataaaatatataaattgnttttaaaaaggaagtaagctgggacagcttctgccnataaatatatnataaattaatattataattattaa

SEQ ID NO: 393 - DNA, 486 bp, Mus musculus
  misc_feature (1)...(486): n = A,T,C or G
tgattggagtgcaggcagtgtgaaccaccagacacagaggatgggaaccaaacttgggccctctgcaagagaaacaagcattctcaacagctgagccatctctccagacgctcgcctagcttcttataatgggactggaactgcagatagacatcatgaagcctgtggtctcagggcttgacccagaaattcgtgcaaggaaattctgaagcatttcaacccctggtgactntgnttggactccagatcagagactggagggccctttcccctagccagatcttcagagtcaggaaggaagatgagaaggaaggccagtgaccgtcaggaggaacacagacactcaggaggagcacctgttctgtcagacactgtcctgttctgctgggctgacagcccccatcttcagcatccctccaaacacaattcctgccgttagtctgaggctcagtcaccagctggccagccctgaacaagctacagtct

SEQ ID NO: 394 - DNA, 230 bp, Mus musculus
ggtgtggaccctccttgggcagatggtcctaggtgctataagaagaaatgctgaaagctactagaagcaagccaataagcagcactcctccatggcttctgcattagctcctgcctccaggttcccaccctgcttgagttcctgccctgaacccaaggttatacactgtgctctggaagtatgagctgaaataaatcctgccccccgccatgttaccttaaaaaaaaaaa

SEQ ID NO: 395 - DNA, 439 bp, Mus musculus
  misc_feature (1)...(439): n = A,T,C or G
ctggcctatcttggttgtcaacttgactgcatctgcaatcaactgagatgtcaatgagcagacttctagcaaccaatccagatgtanggagatccaaggggggaggctccagtttcttctgcgtctctggcttctcgtctctcactagcangttcgtctaccttgnttgagacttggtctacctcactgctgccactgccactgccacagccatggctacggccactgccatacagccttcctcagagtcacttctcgacgcagtgggcaggagttaacagtgttatcccagctgggcatggtggcgcacgcctttaatcccagcacttgggaggcagaggcaggcagatttctgagttcaaggacagcctggtctacagagtgagttccaggacagccagggctacacagagaaaccctgtctcgaaaaaccaaaaaa

SEQ ID NO: 396 - DNA, 100 bp, Mus musculus
  misc_feature (1)...(100): n = A,T,C or G
atgagaactccttcctggaagctgntgccntgggagncaacanggactanctgagaactaaggcggacgtgtgctgaanaggtgacaggcattcttacca

SEQ ID NO: 397 - DNA, 278 bp, Mus musculus
  misc_feature (1)...(278): n = A,T,C or G
caggcactagctctaatcgttnagaaaggtgccnnagttatgcanangatctaggggctngttgtntttgtcctgctcattctgtctttgcccgtgcctagcatgttccctcttcaatctgactctgtaaaactctcccagtaaaactgtgtccttctccctctctgtggctctactctctcaagtgtactgnactgctgcccatgcactctactatattcctttaccattctcttntagctgtactgnntttctcttccttaagtagcttccccctt

SEQ ID NO: 398 - DNA, 287 bp, Mus musculus
  misc_feature (1)...(287): n = A,T,C or G
ctcagtacacacttctncccacccacaccaggacactatnatcccatnntggntggctgtgagccaccatgtggctacctgggaattgaactcangaccctctggaanagcagnagtcagtgctcttaaccacggagccatctctccagcccctggcancttttcaaaagatggaattctgttatttcagttggatgtggtggcgcctgtcttgactgtagctccagcatgttgggaggtggagccagaggatcagtttacnttttaccttggtttctgagagccgg

SEQ ID NO: 399 - DNA, 318 bp, Mus musculus
  misc_feature (1)...(318): n = A,T,C or G
ttttgtcacacaatgatggacacattcttttgannacanagttgggccgcanagatggctcacnncttgangattggtcttccagaggtcctgacttcnattaccagcanccacatgggggctcacaaccatctgtaataaggacccgatgccctcttctgacgtgtctgaanatagnacagtgtattcacatacatgaaatgaatgaataaatctttttttaaaaaaaagacccaaagccctgttntgacgtgtctgaagatagnacagngnattcacatacntgaantgaatgaataaatctttttttaaaaaaaa

SEQ ID NO: 400 - DNA, 165 bp, Mus musculus
  misc_feature (1)...(165): n = A,T,C or G
tgatacccccgccctnttntgcctggcaagacacctgcngtcncnccaaanagctacctcctggggactgaaagagcttttatgttnntattttgagacagcatntgtaatggctattcctggttgtcaacttnactatatctggaataaaatacaatccagaat

SEQ ID NO: 401 - DNA, 368 bp, Mus musculus
acactgagcctgatttctgttgctatggaaacaccatgaccaaaagcaactttgagaagagaaggtttatctcaccttatgctgtatagtccatcattgagaggagccaaggcgacagcttcaaggaaggaactgaagcaagctactattttattttattttattttattttattttttatgttttttattttattttattttattttattttattttattttataaagctcggtctatttgtaaaatgaattttatgatctagaaatgttgaaatgggatgaagcaccagcgacataaggaagaggatcagttcccaagaaacatacataggcttgacaaattaaagtggatgagttgacccctttt

SEQ ID NO: 402 - DNA, 295 bp, Mus musculus
ttaacggaggcagcagagaagctgactattcaccctggctagtgtctcactgtcctctgggcttcgaagaggtatggcggaggaagtaaaaggctctttgggggctggtgagatggctcagtaagagcacccgactgctcttccgaaggtctgaagttcaaatcccagcaaccacatggtggctcacaaccaccggtaatgagatctgatgccctcttctggtgtgtctgaagacagctacagtgtacttacatataataaataaataaataaactaaatctttaaaaaaaaaaa

SEQ ID NO: 403 - DNA, 225 bp, Mus musculus
  misc_feature (1)...(225): n = A,T,C or G
ccctcctcactggaccttattgttgggnnaantcaggntctattcanatattantatatgtaatcnanacctgngagcantgaagtaaagaaccnccccgcttttgatctctgtccnggttcaatgttcactccgttcttggagagagggaggaaccnggttntgggaaacatntgtagtgggatttgatgcccctttctggtgtgtgggaagagatattaaata

SEQ ID NO: 404 - DNA, 163 bp, Mus musculus
  misc_feature (1)...(163): n = A,T,C or G
gtgcataccaatactgtggaagaacccatatngnacaggtcacaattgcctgtaattngagctccagggggttctgacacctctgtcctctgnggacaatggtactnacatatacctacattttaaaataataagtctttaaatagtctcttttaaaaatatt

SEQ ID NO: 405 - DNA, 221 bp, Mus musculus
gggttctaataatatctggagaatggtagcatcaataaacatgctaatgtgaaagggggaagaaaacctcatgggaacccacccctagacaaagaaatattgaccactaatgactactgaggtaagaagagttagcctctatctagccaggaatgagtcaccaattggttgtccaataaaaataattcagccctgaaaccatatgcatacaacaaaaaaaa

SEQ ID NO: 406 - DNA, 303 bp, Mus musculus
  misc_feature (1)...(303): n = A,T,C or G
aggttcatgggttctcttcccaaggagatggaaganttaaacagccttcaatgggaaaagacttnaaaatcttggaaattaaaaacaaaagggaggtgtngccaggaggctgtntcctgggttaagagngcttgctgcttcttncaaggacccaagannnnttcccannaccaanagctggcgnacaaccttttggaattaacccaagctccagggatccacgactttcttctggcctcantggacagntaacatntnggnaatgtaaaaacanagnccntattaaggacatttttttgatgc

SEQ ID NO: 407 - DNA, 392 bp, Mus musculus
acccaggaatcggagacaactattctgctcaccagctgtgtagcttgtacgcattgacacccaagtgccctgcgccttcaacttggaaagctgaggcaggattgtgagttctaagccagcttggcttacacagagcccagacccttcatcccatggtcctcccaagtctgtctctctcatggactctgtgaggtgcggattgaaggccctggaagaacttaacagggctggtgagatggctcagtgagtaagagcacccgactgctcttccgaaggtccgaagttcaaatcccagcaaccacatggtggctcacaaccatccataatgatcaactccctcttctggagtgtctgaagacagctcagtgtacttatatacaataaaaataaaa

SEQ ID NO: 408 - DNA, 467 bp, Mus musculus
  misc_feature (1)...(467): n = A,T,C or G
accacagacccccaangcagcagaggcaagcagccanggncctaaacctcccagactgtgagcccaaataatcctttcttctttttctgttgattatcataggccttctgtcacagcagtggaaagttggtagtctgaggtctttcgtaggccccagcactgcataaaccatacacgctggtgcatgcctgcaatcctagcactctggagccagaaacaagaggaccaggaattcaaggttatcttttgctgcatagtgagttgtgaatttaggctagcctgagctatattactgttttaaaacaaaagcaaacaggtgactggagagatggctcagcagttaagagcactgactactcttccaaaggtcctgagttcaatttccagcaaccacatggtggcttatagccatctgtaatgggatttggtgccttcttttggtgtctgaagacagccacagtgtaccc

SEQ ID NO: 409 - DNA, 255 bp, Mus musculus
ggcccttgaggggttgagacccacaggttgagaacctctgctatattgcagtcttgaagatcaagcctttaacaagtggaccttccggaaatatttgagatccagtggaacagacctttgtatcaaatttcctctctgaaccaaagataataggccaaagagatgctctgctgggccttgtgtgttggcaggctgacatcaaactgctccctctcccacctgtctcctccattaaacgtctcaaaattctgaaaa

SEQ ID NO: 410 - DNA, 176 bp, Mus musculus
  misc_feature (1)...(176): n = A,T,C or G
ttaggacttgctcaagctacacaacatngccnctgtactnaactggntcaganctgnagagatggctanntggttcagagcaccnactgctcttncgaangncctgagttcaaatcctgacaaccncatggtgnctcatgagagagagatctgacgccctcttctggtgtgtctga

SEQ ID NO: 411 - DNA, 231 bp, Mus musculus
  misc_feature (1)...(231): n = A,T,C or G
atggaagaggtttagaccatgccttacttantcnttccnttgaggggcctgcacngctatgcagtgtgccccagttttcccaatttgtgagttgttaccagtattggggtgggccttggtgattcagctgtctttgagtcattnctgctactgtcagtaacccctcactcatatttcatcatagtactgaaggtagccccaataaaactaattggttcaccaaaaaaaaaa

SEQ ID NO: 412 - DNA, 235 bp, Mus musculus
gctcttttgaatgttctgccagcctgcctagtgctatgtctccaccaacgatggtcaagaactcaccctctgaaaaggatgctacattggatcaagatgtagaacactcagctccttctccagcaccgtgtctgtctggatgctgccatgcttcccaccatgatgatacaggactgaacctctgaacctgtaaaccacccctaattaaatgttgtcctttatgagaaaaaaaaaa

SEQ ID NO: 413 - DNA, 183 bp, Mus musculus
  misc_feature (1)...(183): n = A,T,C or G
cttcttactatatagacaaggctgnctctattgtcacaganatttgcctgtnctgcctccngagnctgaaaccacaacacacctnntttatgtacnccnnaaatgctctgnaacttgctccatagaccannctggnctcanactcagaganctgnctgcctctgcctcctgagcgctgggact

SEQ ID NO: 414 - DNA, 184 bp, Mus musculus
  misc_feature (1)...(184): n = A,T,C or G
gaactgagggtttctcttcttagancagggtggtcttgaactagaanagatctgcttacctctgcctcccgagggctgccattgaagatgtgtgctcagcccagaagacaccctgcccagcaccatgtgatgcaggaagggacataaaacacccagaggtctcggatgcccctacgatgagcaa

SEQ ID NO: 415 - DNA, 245 bp, Mus musculus
gactgaggtgttcctggagaccttggcagtcagaagaggcttctttgcaagaggacctgggtccctgggtctgtgtccctgcgttccacatactggctcacaactgtctgtaactgcagttccaggagctccagcgccctcttctggcctttgtggcactgcattaacacagtgcatctatgtccaggccgaacatcatacacataaaagaataaaatagaaaatgtttgagttaaaaaaaaaaa

SEQ ID NO: 416 - DNA, 203 bp, Mus musculus
  misc_feature (1)...(203): n = A,T,C or G
gaggggaagagatgatgcggggntnaatagcactcangcactggggggtcctgcagaggaccgaggttcaattctcaacacccacataacagctcacagcaatcactaactcagttccaggagatcaagcacccttgatctgctttattgcatgtagacatatatacaggcaaaacggtcataagcataaaataaaattaaat

SEQ ID NO: 417 - DNA, 100 bp, Mus musculus
  misc_feature (1)...(100): n = A,T,C or G
gggcatgtggctggagtttatncaaagccctgttcattcagaagatanagactgancaaatgggaanataactgtanaaanaaaagggaaagtgacagaa

SEQ ID NO: 418 - DNA, 138 bp, Mus musculus
  misc_feature (1)...(138): n = A,T,C or G
gcctgttccttagatggaggcgtcttgaagccctctatgtcaccaaaggcacgcnccccaccatacacaaataaatcttacaaataaataaacaaacaaacaaataaataaatgtgacttaagactcaaaaaaaaaaa

SEQ ID NO: 419 - DNA, 228 bp, Mus musculus
  misc_feature (1)...(228): n = A,T,C or G
cctaagcctgttccttcacacaatttntacttnaacanactgggataatcatgtaacatttntnngnngaaccgtgactgacctggaantnagganatntgtctgcctctgcctcctgagcgctgggactaaaggtgtaccgacggnggggnntggccaagggtttttgtttgttagntttttantactcaattaattattgctcacagtncaacattcgcaacactt

SEQ ID NO: 420 - DNA, 314 bp, Mus musculus
  misc_feature (1)...(314): n = A,T,C or G
agcaggaatctgcggaagggganccaggaagtnccnttgaanagcttcacaccttaaagacagatctttggagcctggctgagcaccaaccaccaactccctcctcaccatgccctcctgccctgaagactccatttgagaggctggagagatggctcagcagctaagagcactggacccaggttcaattcccagcacccacatgacaactcacaacatccctaactccagttctagaggttttgacgccctgaaacagacatgcatgcaggcaaaacaccatttgcacataaaataaagaatcttttgtcatt

SEQ ID NO: 421 - DNA, 290 bp, Mus musculus
gactgagttccagggcttcctcaccctccgcacacgtacaagaagacaatccacaaatgcaaattaaaataaagcattaaaaaagagacaagggctggagagatggctcaacggttaagagcactgactgctcttccagaggtcctgagttcaaatcccagcaaccaagtggtgcctcacaaccatctgtaatgggatctgatgccctcttctggtgtgtctgaagacagctacagtgtacttatatgcataaaataaatacatttttttaaagagagacacaaactaaa

SEQ ID NO: 422 - DNA, 209 bp, Mus musculus
gactgagatttatttgtgtatggtggggagcgtgcctttggtgacataagagggcttcaagacgcctccatctgaaggaacaggctgtgcaatgcttcacatggattctggaagaacatcaagcactcttaaccactgagccatctctccgacccctgaattttcatgtactagctttctggcattgtgcttgttcattaaaaaaaaaa

SEQ ID NO: 423 - DNA, 208 bp, Mus musculus
  misc_feature (1)...(208): n = A,T,C or G
atgcatgcctggactgaacttaccccaaccctaanatatatgtgancanatgtgcatcttggncnttntgtnggtcctnaggtaactggngtggggntnnccctgactgtgatgcttgcctgtggatcctgtgctctgctgggctgccttgcctggnctcagcaagagaggatgtgcccagncantcctcccatgacttgatgtgcca

SEQ ID NO: 424 - DNA, 173 bp, Mus musculus
ccaaggagtgcaccacctttcctggagctgaagttacagaaggttatgagctactactgtgttggttctggaaacaagacctagggtcctctgcaaaagcagcagaatacttatttgctgaggcatctctccagcccctcaacttcattcttttcactcccccccccccttaa

SEQ ID NO: 425 - DNA, 534 bp, Mus musculus
  misc_feature (1)...(534): n = A,T,C or G
aactgaggagttgctgtggtcatggtgtctcttcatcgctgtgaaaccctaaggcagaagctctcgggttatatgttagtgtgtcacaagacttctcgggtcaaccacttcattttataaatgaggttcctgagagtcctatactggaagatgacatgcagtaagatccgtcctggaaaaataagaacacacgtcatttgttcacttaagagcaggaggaaaaagcagatgagagcaaacgttatatgcaaagctgatctcccggatggaaagagctgagtcctttttgggtggtttgggttcttagtgttagtgngagagctgagacacaggctcaggaccgcacccatccacctcagcttgtgttctctagtctgcatccctacccccatcactcttgtctaagacaaagattgtattccttcactcatttcctttcccttacacctcaccagctcttactcatccatcagtctgtatttgtgtgcctacagggtcttacacatcctggaatccaggttaggtggcttatgg

SEQ ID NO: 426 - DNA, 397 bp, Mus musculus
  misc_feature (1)...(397): n = A,T,C or G
gactgaggacctgtgcccagaataccaccatcactgcggactgggccactcctacatcaattggtcactaagaaaatgctttacagatgtgcccacaggccaatccgatagaggccacatttccactgagaatcaatgtacccaggtgtgtcaacttggcaactgaagctgtaagagagcacagaatccggagtgactctattaaaaggtgtggccttgttggannannngngncactatggggggtgangatttgagggctnctantgctctgctccacatccccccacccctaaaagtgcagtctcctggaggcattctgatcaagatgtanacttttcctgcaccatgtcttcctgaatgngtcatgcttcctgccatgatgataatagacgga

SEQ ID NO: 427 - DNA, 512 bp, Mus musculus
  misc_feature (1)...(512): n = A,T,C or G
ccctccagatgtgcatcatgancatgntnganngagatcttcttcgattannnaanctgnaatgatctctttcctgtttaaatttgannagnaacccactcccagcctggagacgcnnagcttgaaacagtactnancnaggtggcnagganggcatcngtgttnttgtgacacatgcaccgagacgctggaactctgagaggncccatcagggacaggccanagccagttcctntgnagngngctntgccctcccacctnctctntccctctctcctttgcccatgctnctttntgtgagtcttcctttccttcttctcctcctttttcttntccgcctcatgtncttcccactccttctccccactctgctcctccttcctttcttctttatcctcctccttctcctcttcctcctccttttctttatcttccagttgcctctactctgagttccccttaaggagtcaaaacccccagagtgnnccaccagtgagaataagactcacaga

SEQ ID NO: 428 - DNA, 100 bp, Mus musculus
gtggactccactgggaactgcacctcatatgtgcacaccgtcctatgccccacaagtacatccaatttaattaaaaatccttagctgggaaaaaaaaaaa

SEQ ID NO: 429 - DNA, 291 bp, Mus musculus
  misc_feature (1)...(291): n = A,T,C or G
tgcttacttacatatacattnctgtatgtgtttgnattnacacttgagcacaggaatgcatgcgtgcatgctttgcatgctctgggggntatgagtgtatgggagtatgcaccatggcatatgtggaggtcanaggacaactctggaattagttccctttccaccttcacatgggttctggggaatagaactcagggcgcaaagattgtatagcaaattcctttaccctctgagccatcttgccacctctcttttcttttttgaaaactggattaaaaatatatatatata

SEQ ID NO: 430 - DNA, 357 bp, Mus musculus
  misc_feature (1)...(357): n = A,T,C or G
agacaactgaccatcacttcctcntncncctcctcctcctcttcctattcctcctcctccngaagaatggnagctaagatctntnctgntcttttgctcannanctnaacttcaagaganggatcctnatgnngcctctattatngggggggcaggcgancctgcgccctattagagganaagaaaaccagcntaacacgatacagatcanngttcacatntcccgcagngntttnnagctgagaagtcctgaacaacctcgngaatccttggnctcctcctccaatctccacagtggttactgntccataaggacgctgctgaattaantaaaanaatgcacacaatgaaaaaaaa

SEQ ID NO: 431 - DNA, 342 bp, Mus musculus
  misc_feature (1)...(342): n = A,T,C or G
gactgagaccctttgcaggaccctaactgcctcactggagtggatcagccgcacttgcacctgggcccgtccagcccatagcagggggnncgacaagagggtttctctgngtagccctgactgtcctggaactcactttgtagaccangctggccttgaactcagaaatctgcctgnctctgcctcccaagtgctgggataaaaggagtgcaccgntgccaccaccacccatcaaaggagctgggnctattggctgaatagcacctaagtgtnctatctgcccgtgtctttctgtctgtcctttataagccttgcatttgagtcaccatgacctttatgtga

SEQ ID NO: 432 - DNA, 505 bp, Mus musculus
  misc_feature (1)...(505): n = A,T,C or G
gactgaggagtgttttgcctgcttgtatgtgcacccattgccggccccagagaagggcatctgttctcatcacttaggaccgaagtttcagacagatgtgaactgcaatgtggcgctagaaaattaactctgggtcctctggaagatcagtaagtgttcctaactgctgagctctcgctccagcgtcagacttgtgtttcttacactcaagagtaacttagcatttatgtcctttcacgaataaagcatggtatattgctgaagtctgaaanctgngntacgaattctgccaggatctgtntcatcagggacaaggaactgcgggtagtttctatcatttcccctcatttctgaaaatttcagttagctatcaagagtcttgtttaaaaaaaaactatcataaatgngttactttaaaaaccatgcatacntatagngcttntagtttgaaaccactttctgcaactttgattttgatagaaacctttgacgaaatgaaaaaaaa

SEQ ID NO: 433 - DNA, 170 bp, Mus musculus
  misc_feature (1)...(170): n = A,T,C or G
tgggacctattgatactccanagtttctncntggcaaannacactgtcnatannacaaacagaccaccaacanactggnngaggaacaaagcggagcactctccgtgaccangcgctccgagacctcaacacttacacagagaanatgcgnnaggcactgaggcgctttg

SEQ ID NO: 434 - DNA, 465 bp, Mus musculus
  misc_feature (1)...(465): n = A,T,C or G
ctatgatcaatgcaggcagtaggccactggagcagagcagggtgtacctgcatttccagcatgacctagaatgtgaactttagtcacctataccctttggccacaggcactggaacaaccaggacactgaacaggttcattgnactcaggggctgtgaagcttatcaagaaaccatttcctggggctggaaggatggctcagtagtcaagagcacttgctactcttgccaagaaccggagtttgattcccatcaccagcatggtggctcacagctgcctgggactgcagcttcagtggatccaaagccctcttctgatgtcaaagggcaccagacatatgcacaggtcacacacacacacacagcacatatttaggtgatacacacatacaggtattcatatatgcagacaaaatacccatatacacacaaaaaataaatctaattttttattgaaaaaaaaaaa

SEQ ID NO: 435 - DNA, 224 bp, Mus musculus
  misc_feature (1)...(224): n = A,T,C or G
gactgataactagactgaggtttttctacagtccangaattngaggccagcctggtctacagagagagttccaggacatccagggctacacagagaaaccctgtcccgaaaaaccaaaactttgatctcacttcaggacccaggagactgacttgagggacttgatggatcacttcatgtctcttcccaatgtggccataccgaataaagcttctttttctgaa

SEQ ID NO: 436 - DNA, 463 bp, Mus musculus
  misc_feature (1)...(463): n = A,T,C or G
ttagagacttaacgtccccgncctggtctncnattcttgtncagngncacatggcngcangangatgctcaggactactganccatntatntncntgncccagaagcacctccaaggaagtgggaccactggcctgggcacaaccanaaagctaagtgcccttnatctncagnacatgcccctgcagnctnggaccccanacacctcanttnggncattttcctgnggtgggaatcaaatccaggtncatcccagactgaggctgccccacttcttacttgaaccatctactgcagctctgccccaaatgatgccgggttctgatggcaaccatacatagctaaatactagcttcagggccggtgagatggctcagtgggcaaagatgcttgtagcaaagcctggattttttgagagagtcctgaaaagtatcctctaacctgnggcatgtgcacactaccgc

SEQ ID NO: 437 - DNA, 126 bp, Mus musculus
actgagaatgcactctcatccagctgtgtgctttcagctgttcctgcctcctatgccttcgctgtacaattatgggctctagccctctggaactgtaaagtcaactaaatgttttctgttataagt

SEQ ID NO: 438 - DNA, 286 bp, Mus musculus
tttgaccttgccctttgacctttggccttggctcttgtgagacctgcaaaggtgcactaggatccagatacagataacgggctggagagatggctcagcagttaagaacactgactgctcttccagaggtcctgagttcaatccccagcacccacatggtggctcacaaccatctataacgggattggatgccctcttctggagtctgaagacagctacagtgtactcacatacataagataaataaatctttttttttaaaaaaagatacagttaaaaaaaaaaa

SEQ ID NO: 439 - DNA, 251 bp, Mus musculus
  misc_feature (1)...(251): n = A,T,C or G
attctgatggcatcatactgnataacaaatngagacacgnnctgtgacacagntgtttccaacaccananagttntcantgagagatggctaagcagttaantgtgcntaccaatactgtggaagaacccatatcggacagntcacaattgcctgtaatttgagctccagggggttctgacacctattgtcctctgnnggacaatggtnctctcatatacctacattttaaaagaataagtctttaaattg

SEQ ID NO: 440 - DNA, 202 bp, Mus musculus
  misc_feature (1)...(202): n = A,T,C or G
ccctggctgtccctggacttgttctgtagaccaagatggcttcaaactcagaaatttgcctcccaagtgctgggactaaaggtgtgcaataccatgcctgctaagtctttcatactttaacattaagttttccacataaaatattgtctcaaattaaacaattccctttcaagtcctgnagggatntgtaatgaaaaaaaaa

SEQ ID NO: 441 - DNA, 164 bp, Mus musculus
  misc_feature (1)...(164): n = A,T,C or G
gcctgggacactcaccttgttcctcttcatttgtacagaaggatgctacagngaagcaccatctagaaacctgagactgatactggatcttggatttcagacttcccagcatccagaacagtgagaaataaagttatgtgctttatatcctaaccaaaaaaaaa

SEQ ID NO: 442 - DNA, 163 bp, Mus musculus
  misc_feature (1)...(163): n = A,T,C or G
aactgagcatgtcgagaggagctgggganaanggtgaaggcttnncatggtcaagctggccaagcccatnccagggactatcttggggttgntatggctgagataaaacaccatgaccaaaggcagggtggaaaaggaagggtttattccacctaaaacctct

SEQ ID NO: 443 - DNA, 274 bp, Mus musculus
  misc_feature (1)...(274): n = A,T,C or G
catcctgcggggcacacatgcatcgtaaagctcanctggaccgcatgagagctcatcacagananganagagagagcctgatgaggcggctcatcagtcaagagcacttggctgctcttccaanaggtcctgagttnanctccaagcaatcacatggtggctcccaactgtctgtaactccagtcccaggggatccagtcactgggtgtgcttatngtgcacagacatacatgaaggcaaaacaccctcatcatgaaggggttatttttttttt

SEQ ID NO: 444 - DNA, 159 bp, Mus musculus
  misc_feature (1)...(159): n = A,T,C or G
aggggctggcgataggctcaatggttaanagnaccaactgctnttctgaaggtncgganntcanatcccacaaccntatggngggtcacagncatccatancgaaanntgatgcctttttctggagnatctgaggacagntacagtgtacttacatata

SEQ ID NO: 445 - DNA, 213 bp, Mus musculus
gactgaggactgactgcccagagtggcactgcccacagtaggctgtgccttcccatatcatcctactggccagacatgcgcctttcatcccagcacttggaaaacacaggtagatggatcgctctgcatttgaggacagcctggtctacatagcaagttccagaacagctagagctacataataaaagagactctgtctcaaaaagtaaaaaa

SEQ ID NO: 446 - DNA, 293 bp, Mus musculus
  misc_feature (1)...(293): n = A,T,C or G
tcatcgatggtccaataacanagccancttatgacactaaccnctgnnggncntcgacctgcaggatgctggtcctcgatgtcatcatgtgcatgagccnncctgactnctganctcagccctgctggataactgaactgcccactggnaanacancagantntntanagcggcantcgtctgananaccattcttgaactctggacccgcgatgcttgaaatgagtggtctagcgggtcttggngatgcacgcaggnaaccccanngcctttgggaactgaggcagggggat

SEQ ID NO: 447 - DNA, 174 bp, Mus musculus
  misc_feature (1)...(174): n = A,T,C or G
taccctgcccctgcaaccaacaacatgatgccttcccttggcctnnntgcaacnnacacatcctgtgtgatattgtacaggcgaccttngaancgacgtagggcngctctgatcatcctaatncctccttccatttcaaggaagaaggntacttgagaaggatccagctgagag

SEQ ID NO: 448 - DNA, 107 bp, Mus musculus
  misc_feature (1)...(107): n = A,T,C or G
gaaccatgagattataggggcngtaattggcaccncncccccttncttgataacatagnagcnccaccantaaantggggtgccttgntcataagaaaattaaattg

SEQ ID NO: 449 - DNA, 134 bp, Mus musculus
  misc_feature (1)...(134): n = A,T,C or G
agccctggctatcctggaactcactctgnagaccagactggcccaganttcanaaatctaacagnntttgtagccaccttgaagtnntgggattaaatgcacttgtcacagcaaaaaaaacaatggggggacat

SEQ ID NO: 450 - DNA, 254 bp, Mus musculus
  misc_feature (1)...(254): n = A,T,C or G
gatcgggaactggacgcaccncctccgtcacctgcgcancaggnantantaggngacacctttctagaaaaccgacgctatgctggggagaccccgcagctaatctgtcaggagattgatactggggacctctcacctcaacggcancgcccganggcgggcaaccccaactnaccgtcaggcagattggtggggccaattcatganagccggggaagaccgtggggctttcccggntcagctgggggggggtg

SEQ ID NO: 451 - DNA, 237 bp, Mus musculus
  misc_feature (1)...(237): n = A,T,C or G
tgtgtggggtggcactaccttgctatgctgccattnagagaagctcgcccangaactgcngagaggatcctccacagcctnacctcaggctggttggaagcttaagntnctctgngaacnangctattgctgctnaatnntgactggaccnttgctggcgcctnccctntnacggnggtgatccgnattcctctaggttacaaacacnggggggnggtctgggaataatctaatgcc

SEQ ID NO: 452 - DNA, 242 bp, Mus musculus
  misc_feature (1)...(242): n = A,T,C or G
cctgggcagagccataattacttcttntggaactctcacangccctgacagggaggngggngggnctnncgtaaaactctnacctcttatccaacatgggacttcctgcccttgntncttccatgcccaannactaaacttgttgtgcacagaacctcncctnttnagangcnaaatgccgtctnnaaaaaatggtcccnaaaganaacacctnttgtacgnggggggggggtccctaacca

SEQ ID NO: 453 - DNA, 186 bp, Mus musculus
  misc_feature (1)...(186): n = A,T,C or G
aacagagaccagcttagctgcctggancaggnttanaccaaccgaggctcctgcaaaggncactctcaaatgtgttgagatgcccacaagctggtgcccgtgtgcttcaggttcccttgctggggtggggccttggtcatgcagntgtcttttggagnnctttttggggggggggagtatccccta

SEQ ID NO: 454 - DNA, 290 bp, Mus musculus
  misc_feature (1)...(290): n = A,T,C or G
atactgatataacaagccaagctgctgacaaggaaaggctctgaagagtggtaagctgcagagactctgagctggaagaaacagagaccagcttagctgcctggaagagggttagaccaaccgaggctcctgcaaaggacactctcaaatgtgttgagatgcccacaagctgtgccgtgtgcttcaggttcccatgctgggtggggccttggtcatgcagctgtctttgagtcattttttggggngtgnaagtatccctaataaaactcattggttcacgaaaaaaaaaa

SEQ ID NO: 455 - DNA, 195 bp, Mus musculus
  misc_feature (1)...(195): n = A,T,C or G
actgaggtgctcagagctcccgaggncatggacacattttgatgctctcaagttttggaatttttttgtttgtttgtttgtnntcattgngttttctgctggcttaaagcatttcccacataaccacattaactccagaaacgaggtttttatgagctgtttagaaagacaagttcttatcctcaaaaaaaaaaa

SEQ ID NO: 456 - DNA, 275 bp, Mus musculus
  misc_feature (1)...(275): n = A,T,C or G
gactgaggccttaataaatggctaactccctctgctgaaagccaccgnntctgtggtaccatgggatatgccaccccagatnnttnattangaatganggacttgnnctggngagatggctcactgggcaagancacccaantgtncttncannggtccanantncaaatcctagcaaccacatgggnggctcacaaccatccggtaacaagatctgactcccctcttctggagggnctganggnggggtacagtgtatttacatataataatac

SEQ ID NO: 457 - DNA, 261 bp, Mus musculus
  misc_feature (1)...(261): n = A,T,C or G
ctttcacatgaaaaatgtcctgntcttcgacaatagaactttaaacttcagtactcttcaagaattcatctagngaaacctgtganaaaagaatgcatgatacatatcattttatagctatccacctgtcagacttgtgaagatctcctaactgtactttattggtgacccttgntgaagaaacttcctggctgctttcctgtctttctatatcattcatgggngngggggggcntccatcactcaaacttggagatgtaa

SEQ ID NO: 458 - DNA, 112 bp, Mus musculus
  misc_feature (1)...(112): n = A,T,C or G
tagctctcctctttccctnttcttganctcatgccttcacaggttactactnccctgaantcccntcggnnacgcntttattgncaatcccacagactgtctgagacacaca

SEQ ID NO: 459 - DNA, 283 bp, Mus musculus
  misc_feature (1)...(283): n = A,T,C or G
atactgagagcttcgtgacnnaatgatcacatcnttgngaggccaaatcagaanaaacnctcattcctnttctgtagagaacggatngtgcccnactatgcagccttncancagaaanagannctatgntgnccaacggatctctaactacctnactttcnnacgcctgtntccaaccttaagtgcactgtcngtaacnaggagtcatgccccgnctccaggctgacctctgaccccaggcgnggggggggcctggactctgggncgctccgttcccagggaa

SEQ ID NO: 460 - DNA, 171 bp, Mus musculus
  misc_feature (1)...(171): n = A,T,C or G
gggcaatgaaggagatgaaaactgccctacacccacaagaacagaccccatcagcttgngnnnctggcagaggatgccaggatttgtgcggattttnaaaaactgactgtganccanctttctgctttgcctaagggaaggaacccaaaaggngggagagacttgaagtcc

SEQ ID NO: 461 - DNA, 229 bp, Mus musculus
  misc_feature (1)...(229): n = A,T,C or G
aacaagctgttggcccaattccccttctccagtttacacaggtccaggnatcccaccngggggaattganggggnccccnngttgcacanancaatgnnancccggcccttaaaggggnaacccgganaanaattctttccaaaagggcatcnccnaccnangggggngccccctttttttggtttgttttataaaggttngaaaatttaagcctttaaaccattccca

SEQ ID NO: 462 - DNA, 264 bp, Mus musculus
  misc_feature (1)...(264): n = A,T,C or G
aggtatgccactgtgtagcccagtgtagtgaacacttggaatacaaaataaagatggtggaatgagacattccntctccagttcctatcatcggatntgtcncacctgtgtgtcacccagcancatatngggaggccagctgcctacaccantcanaaacaggggacccacaaagtctgcaggggttgannttgggccttttcagtgcctacnnattncatnntggnctttacttgncgatttctcttcctgccccttgtatgt

SEQ ID NO: 463 - DNA, 122 bp, Mus musculus
  misc_feature (1)...(122): n = A,T,C or G
tttcactggcatgacctagnttctggagagtagctattgtntaatgcttgtancnctcngatggctaacancgaggngagnttganctgaaaattancnagatgtttgctattataaaaaaa

SEQ ID NO: 464 - DNA, 312 bp, Mus musculus
  misc_feature (1)...(312): n = A,T,C or G
ttgctgagctgaccctggacagatgggaagcgagccacactnctttgtggacncncgngntaggntttcaatagancancctnganctngatatnnnccgagccctacctggccacactntgngcctggtactcttncagactcctctccaaccctgtttcctgccatcagccttgctcccactcagaggactgctntgaccacacttgtttgggtgacacngctgggngtgttgtaacgggcctgcaggccccccctgtgcggaggntnaaanggataactttcngggagtggattctctcctttccaagg

SEQ ID NO: 465 - DNA, 133 bp, Mus musculus
  misc_feature (1)...(133): n = A,T,C or G
tcctctcctccacactgacnaccccgcttganttgcggcccaagctgttctcaaaacttaagtggattcagaagcataacgctaaagaatatatcttnctttatngcacctgtaattaaacacgacattgggg

SEQ ID NO: 466 - DNA, 253 bp, Mus musculus
  misc_feature (1)...(253): n = A,T,C or G
aagacccgccttatgtctggcnacaccagagcgncagcgtgcnctctntaaagggcatggaagaaggaagctcttctcctaggtctgcctgtcctcattgtcactgggaagtntgttccttcactgacattagagcctttgggattctgagacatactgaagaccagcagaggcntccggcttcatagactgagcaactattagattcttgggactggtagcacacagccattgnnggcttacctgaaccacc

SEQ ID NO: 467 - DNA, 234 bp, Mus musculus
  misc_feature (1)...(234): n = A,T,C or G
actgagtgaatagagccagggtctctgtactggctggttttgngtgcaacttgacacaggctggagttatcacagagaaggagcctcagttgtgggtgtgccatccctggcctggaagtcctgggttctataagcaagcaagctgagcaagccaggcnaancagccagtaaaaacatcccttccatggcctttgnatccanaccttcctgccttgggnggtcttgccctgactt

SEQ ID NO: 468 - DNA, 264 bp, Mus musculus
  misc_feature (1)...(264): n = A,T,C or G
tataaacagtatgaactgccgagnagcacactctgagaacagctganctgcctggaggaggtgctccaacctctgaagctgtctgnaaattgtgcagtgagccgctgggttccaagattctggtgcctgtcatccatgctggggtaagcttttgatgatgcagcttgtctcccgtgtgacttctggccactgtaagtaacccttccacccatactcctgntaagtaacccacaataaaactcattggttttaccaaaaaaaaaa

SEQ ID NO: 469 - DNA, 143 bp, Mus musculus
  misc_feature (1)...(143): n = A,T,C or G
agactgaagagcacatggngtgtgggtactaanagaagnagactcatctgacttctggacagnagtcgntggcctgaaaaaaggctcnttctttcaacaccctgcctgttcttcaaaagtctagagtccactcctagcacccc

SEQ ID NO: 470 - DNA, 233 bp, Mus musculus
  misc_feature (1)...(233): n = A,T,C or G
cccatcatggggcactntttgtaangatgctatctctggngtccttnagagcattaccgatnccanttgagagcntacagaagcaacttaaagtgttatgcctcgtttactnctggcctaatgtgcttggagagcaggggctntntgctcatgacataaagttntgtcanaaaaggactgggaaaccctttcaagaccnttaaaaatnaaagtggccccgccattccttggtg

SEQ ID NO: 471 - DNA, 186 bp, Mus musculus
  misc_feature (1)...(186): n = A,T,C or G
agactgagattcacttgctgtgatagatactgagagctgttnagtgaaattgagcatgaagcgggcctagcctggccagaaattttaagaaagagatctgcntcatnaaatgttacnccncganaatgnatanaattntttggcccaggggggngggcctttccngtttntgttttggagtcctgg

SEQ ID NO: 472 - DNA, 355 bp, Mus musculus
  misc_feature (1)...(355): n = A,T,C or G
cactgctgtgaggccaganctactcctcagggntangaagaatncaataggggcgtgancagtntctntanagggncactntntanatangantngctagagagcnggngaccanctgaacgaagacatnanttaataacactcatctannnttcntctggccttctatgcagctggtggttgggcagggatgagattnttaaaacctccattaatcttnaggacagaaacaaatttggtatnaaccgnctgnncaangcatcacctgagaggcttgaatctcagagagagctctgcnngaccctatgcctagaacatgggccttcactgttggntttaatgaatgaataaagta

SEQ ID NO: 473 - DNA, 117 bp, Mus musculus
  misc_feature (1)...(117): n = A,T,C or G
caattttactgacacctttnctacactaacncgaggggnagtatngganctatntcnaaccancaccaaancggggggcactttttcgcccccaattntacttttccttaacaggag

SEQ ID NO: 474 - DNA, 472 bp, Mus musculus
  misc_feature (1)...(472): n = A,T,C or G
gactgagactctccttgagaccggttccctgcaaatccagagttacagaattgcgctgacagattaacagcctggcttgggggtgagtttaaaatanaatccgagatgatctaaatcaagaatccttangcagaagttcaagacaggagacttcggaggagactgctgagccctgaattacatgtacatataattatatgcatgtgtatatgcctcttcctaagacaagggtccagaacctccaccacgttctcaaagaggttttgaaccccaaaggatgaagaactggacatggtctagctaaacccagagcccatgttaccaggtttgcccctggctgtcctgtgaagcagcacaatttgnggagagacatcccagagctaaataccanaaagctgaagctgagctctggatctggcaaatgttttaaagactcatggaattattaaaatggctaattaagtcagccctc

SEQ ID NO: 475 - DNA, 146 bp, Mus musculus
  misc_feature (1)...(146): n = A,T,C or G
tgtacacctcttcacctggnntgctattttgnacacaaacnagtgnncnagnatctgttgaaggctgatgnagacagggaacatgttnagcgacntgggggacactccactgnatcggagctgccttcanaggactataggaggtg

SEQ ID NO: 476 - DNA, 430 bp, Mus musculus
  misc_feature (1)...(430): n = A,T,C or G
gactgaggtggggtctttcctnngggtaganaaaagtagatacacgtttagcnnnncgaaaagatacatatcaagcatgactgacncanaccacnagaagataccatgggggagctggacggacggatgcctcaggganaaatagtgnttaccgctcttncagaggactanggtacaattncnacactgggagtagtatcagaancnaagccaaaggctgtcagtatggacttatcttgtcattaaaagataataagcagggtgctgcagagatggctcagaggttaaaggcactggctgctcttacagaggtcctgagttcaattcccagccaccacatggnggctcacaaacatctgnatgaagatctgacaccctnttttggcctgcaaacgtatatgcaggcagagtgctggatacataataaata

SEQ ID NO: 477 - DNA, 113 bp, Mus musculus
gactgagtcccctgcagctccagtcctcgtgagatctgctgccgctggcctcctagcacggctgcatttgattcctcaagagtccagagaaggtgactcttcaaaaaaaaaaa

SEQ ID NO: 478 - DNA, 240 bp, Mus musculus
  misc_feature (1)...(240): n = A,T,C or G
gactgaggccttgtttggaaganagatcactanctacgatgagctaancanangtttaagatcaatgtactggggctggtgagatagctcagtgggtnanagcacccgactgctcttgctaaggtccggagttcaaatcccagcaagcacatggtggctcacaaccatccgtaacaagatctgactccctcttctggagtgtctgaagacagctacagcgtacttacatataataaataa

SEQ ID NO: 479 - DNA, 486 bp, Mus musculus
  misc_feature (1)...(486): n = A,T,C or G
tgaggagatctgagtcccttgacacaggcaggagcagggctcatgttnaaaacgntcctangcgcctggntaacatgcaaangcacagtatcgcnagaagcacagntcctgcacactgccttgcttcctttncnnnaacccagagattgccgnctttgtctgacggccaaacttcccctgaagntcctncanggntgtncggcgcacccctgcctaaacttgcttntgtcacattccacacccagggcagagttctgcatgcgggaacaccatgcccttgcccgggaccttgtnatgtaacaaccataaatgctctggtgggcctgtgtccaagctaggaggaagaggcgaaggcaganctcagntntgaanncaggtgtggagacacatagccgnagtggccctgagccagatggatgaggcagaaggagttngaagntatccntaggctacacacaaagactntngactccaagtaaaactaga

SEQ ID NO: 480 - DNA, 306 bp, Mus musculus
  misc_feature (1)...(306): n = A,T,C or G
gaactgagttgcttcccctggacatttgtaccctgntgattgacatcaagggagagaagtagcaagaaggtggtgtctgaagcagccagtttcatgtctggaaatgtggtcccaagtacttgctccactacttgtctttgtggctttttggactcagcactcangctgacactttagactcttcatctgcagaaaattgtgacaggtaagatctgtctgcntntactccctctatccatgnagtactcaaancataccctgacctaaaataaatgcattaggtgactctgaggaggaaaaaaaaaa

SEQ ID NO: 481 - DNA, 227 bp, Mus musculus
  misc_feature (1)...(227): n = A,T,C or G
tttacgctttgctctgngttagtgggctagtntgatcgtcaatcctctttgtcaactatttnggattaaaaagctgctaggacattagtgaggcatgcatttggatgtgcctgtgaaggggctcctggagagaattaactaaagcgaaacagtataccttgaaggtgtgagtcaccatgggagtgggctgggggagtctggcctgaattaaaacagggaaaggagaa

SEQ ID NO: 482 - DNA, 242 bp, Mus musculus
  misc_feature (1)...(242): n = A,T,C or G
atctgtaaataggactgcntgagacaacgaanactcataangagacctananganactnccnaatactcctgcaaagngaactcaggantattactagagcattatgntnatttaactacacaaagagagcagggcaactgntttaccttggaaggctaaaagtggacagnagggactcacactgnccttgattctttcatttgttcagagnaanaggntgcttatggccacttacaacctt

SEQ ID NO: 483 - DNA, 218 bp, Mus musculus
  misc_feature (1)...(218): n = A,T,C or G
atacaagccctccgcgtaggtgacgggccaacactctcctggttcgttcataagcagaaaagatgtctttggatctgggtaagccaacagccgatacttctcaaatgganaagtagaacagaacccagaaaggagggtccttcattcaccaggccgtttcagggtgaggggaagcccaaaccaaagccccaaataaaaggcatagttcctgactggaa

SEQ ID NO: 484 - DNA, 179 bp, Mus musculus
  misc_feature (1)...(179): n = A,T,C or G
actgagagccgatgtgagggctcaangncttctccagctggcatgcttgntgccagacttccctgccatgaaagacttatctttctggaatgnaaaaccaaactatttcttctaanagccnnncatgaanganntgtctntntgcanctgtgaaaccgaactatgctcttcctaaaggg

SEQ ID NO: 485 - DNA, 402 bp, Mus musculus
  misc_feature (1)...(402): n = A,T,C or G
ctctgtgtagccctggctgtcctggaactcactctgaagaccaggctggccttgaactcanaaatctgcctgcctctcaagngctgggattaaagtcgtgggccaccaccgcccggcccaagaatgaaaggattctgagtaactttgatggnccaactggntgancaaatataaaacggaattggctcaacatcnnatntatgaggngaattgcttaacttagcaagccaggtatagcagaaaaggaggttagcagcaggcaagttaattcagcaaggaggatgagagtggcattaaaatgtttttccttgagttctaagtaagaagcaagaggaaacaacacaatttgggcagcaccaggtgtggtggcacactccctggcatctgggggggtggggagga

SEQ ID NO: 486 - DNA, 142 bp, Mus musculus
  misc_feature (1)...(142): n = A,T,C or G
ccgctgatcggcagggcggacngtgggggagancccgtttctncaaangactganaccggcgcactgccccntcttnttnaccccagtgaaagaggactgnctaatgcccggaacgagagattagaggcaggggatgggtgg

SEQ ID NO: 487 - DNA, 208 bp, Mus musculus
  misc_feature (1)...(208): n = A,T,C or G
gttagagggagagacgttgtgacaagacgtctanagcaanagctgtganaagacggatccagcacgagcnagccatagcgagacgaagatggcagttgtttatnttgtcttnggagtgnngcttagaaagnctttgttcttnttcnnccttttttcccttcttcctcngaacccactttaataacntgngggttttttttccggggct

SEQ ID NO: 488 - DNA, 300 bp, Mus musculus
  misc_feature (1)...(300): n = A,T,C or G
gactgagatcgtggaggtgcattnctaccagaaanncttgccancaggcagcaaaanggacccagcagcatttattcatggctgatagataattgacataattcatcagnttggacgttngtactttctcactganaaatttcaggttcaaaacttacagaagaattttnttccagccaccacccccccgcacccccacccagtgcatggatgcagttaacagaactttgcctttttactccctatctggtttagtacagttcatgcgcaggtttcaataaacattaaccacttttaaca

SEQ ID NO: 489 - DNA, 137 bp, Mus musculus
  misc_feature (1)...(137): n = A,T,C or G
ctgtgataatgccatgtaggtgactggaaantgancacanaacctctgnaagatcanacnangctcttaaccactgagccntctgtccagtgcccatgatacatttngtgggatagnggatagaagaggctccagtt

SEQ ID NO: 490 - DNA, 112 bp, Mus musculus
  misc_feature (1)...(112): n = A,T,C or G
agcctcagagcactgcagagncttgaacatatgaatctttgaatggnagaaaggaccanctcctgntaagnngtnctctgatcttnacatactcattccatgaacacacaaa

SEQ ID NO: 491 - DNA, 133 bp, Mus musculus
  misc_feature (1)...(133): n = A,T,C or G
ggtacatgccctggcctggcctgtaacaatacgcaaaggcagcnnggangtnannaatgcnnggaccatnaggagcccactgccntatttcactgagncaatgngcagcatggagacgcttgtatctccaagg

SEQ ID NO: 492 - DNA, 149 bp, Mus musculus
  misc_feature (1)...(149): n = A,T,C or G
aagagccttgctttaattacantnactgtggctttcctgtggacgtcagaagacnncgcacggaagtccgttctctccttccatcacgtgggagactgaaccaggttatcaggcttggtggcaagcaaaacacttggacattaaataga

SEQ ID NO: 493 - DNA, 220 bp, Mus musculus
  misc_feature (1)...(220): n = A,T,C or G
ttcctctgattaagagatctgacaanctccttacttgnnctggngnnnngnttgcntctgcatcagatttgttgtgtcnatgcnctctgcncttaacactatggcaaatctatgtatcgtaagnactctaactcccttcaagattatatgccatttgatgagcccacctncccactattccactgnccacaaagggctacttcctcttatcctagtatct

SEQ ID NO: 494 - DNA, 166 bp, Mus musculus
  misc_feature (1)...(166): n = A,T,C or G
ctgggtggttccatatantctactgcctccgaatcnatgaataccatgctcggtacccgtnnatcaaaaggttcctattgggnaagtccctattgtttanaaagttatngnaancttnccacccctgctntccttgncnngnttggggntgtggaaggttttaaaa

SEQ ID NO: 495 - DNA, 107 bp, Mus musculus
  misc_feature (1)...(107): n = A,T,C or G
tagaggccgaatctgtcttgnggggganccggttctcttaanaagattntggggggggtgggcctanctgggtntcttccnactaaaaggttgaccccactaaaagg

SEQ ID NO: 496 - DNA, 219 bp, Mus musculus
  misc_feature (1)...(219): n = A,T,C or G
ctgtcttcagatgcaccanaagagggcntcagatctcattacggatgggtgtgagtnccatgancctagatcngatttgaactaaagaccttctggaanaacngccngtgctnttaccatggagagccatctcaccagcccttgttnnccattgtatgtcgcatgcacatgtaantanccataancnttgcctcctctgtttaaaaaagaagggagcta

SEQ ID NO: 497 - DNA, 111 bp, Mus musculus
  misc_feature (1)...(111): n = A,T,C or G
cacggatcaacattactatncctnaagttcctatcctctaaaaagaatnctatctccnaganntgcactttgcaggctacnttccatanaacanaacagaaggagggggga

SEQ ID NO: 498 - DNA, 169 bp, Mus musculus
  misc_feature (1)...(169): n = A,T,C or G
gagcatctctccttaacactaatgtattgnctgttgctaccaccaccaccactgtcnccngctgntgncaccggngctganaatgatgncatcaccacccccttctccnnagcccttatgggagggaagacacggagtccatacagttatnccacggggagggaacaaa

SEQ ID NO: 499 - DNA, 271 bp, Mus musculus
  misc_feature (1)...(271): n = A,T,C or G
aggctcaaacccaagatatgagagntgcaggccggccccaccagtttggtttctcttgctgactaaaagcatcttgaagaagaagagacttgtttcagttgagctcacagtcagtcgttaagggaagccaggacaggagctagagacaggatctgnagcagagacatggangatcgctgcttgctggcttgctcaccctggnttactnagnctgcttttgngtacaacccaggggtgacatcacttggngggctgcaccctcccacataaa

SEQ ID NO: 500 - DNA, 107 bp, Mus musculus
  misc_feature (1)...(107): n = A,T,C or G
actggaaaacacccaggtgaattgactgggatgctgaanaanaggaaaganacaganctatccagtggccttccttggggganagngggggaaccctataagggcca

SEQ ID NO: 501 - DNA, 101 bp, Mus musculus
  misc_feature (1)...(101): n = A,T,C or G
ccaatcgagaacttggaacttcaataaaggggaaaccnaagaaatgattgnactcnagactacaagntngggggcgcagcgcttgctggactggagccaaa

SEQ ID NO: 502 - DNA, 302 bp, Mus musculus
  misc_feature (1)...(302): n = A,T,C or G
ctaacttgccaggctctctntnacaggggggccngtgcancctttgaagcctgacgatcactnactctcccacattattcctgccacaagagagccanccttgcacnatgtgtagccaagcangactgatcttacattnttccagaggancananttcancctcctggcatncacagntannaagagnngggnggacttgnaattccgcctccaagaanancatgtttcnggcctatgcaaacncttngnncccccccctaacttaccnantgactacccaggccttcccccacatatacag

SEQ ID NO: 503 - DNA, 183 bp, Mus musculus
  misc_feature (1)...(183): n = A,T,C or G
gtatactgcaacaagcaacnnctgctcttggccagtaatgannctntcctgggaaaggaaagtncntttctttacnggcatgnaaagcctanctctttgnaagnccaccatgtactgaagacatccaagcactgtgnactgnnctggacttgtatgnacttcctgnttacagccagacattgg

SEQ ID NO: 504 - DNA, 126 bp, Mus musculus
  misc_feature (1)...(126): n = A,T,C or G
agtggggtctttcacatggcatgagaccgaagcctaccatcctactatgataaactgtatccgccatganccaagggnnggnttngctnanttacatncctnnntaaccnagtttctctcatatta

SEQ ID NO: 505 - DNA, 152 bp, Mus musculus
  misc_feature (1)...(152): n = A,T,C or G
ctggccctggctcagcgcgggcccaacatgnatcaaagttgtggtgccaggatgcccataatttatggtttatnctncatacttaacctttgtntctnnaagatggttcccccctggggnttgaccacaccanaaaaaggtgctaaataaaa

SEQ ID NO: 506 - DNA, 143 bp, Mus musculus
  misc_feature (1)...(143): n = A,T,C or G
ttctgctgtgtaagttnctnggctgtcctacacctnngagatccgcctacctctgattcaaagggactaggatnatttgccccggttaaacaanaatactccagggcctggaanagntgggctcngggggttcaagatcccca

SEQ ID NO: 507 - DNA, 129 bp, Mus musculus
  misc_feature (1)...(129): n = A,T,C or G
tgcaaggcactgctggacctgangangaacgngcccctttgtagngcccaaagatatgcgggggactgtttncngnaccgntcttataggagggncgaanactatactttggctttgaaataaaaaaaa

SEQ ID NO: 508 - DNA, 225 bp, Mus musculus
  misc_feature (1)...(225): n = A,T,C or G
tgtccttgattgagctggcccaggaaganatgaggaacgaggtggaagaaggcattactctgttgtctatncatcatctgtctatcaagatcaactacttcattggcaagcaatcatcttgctcatctggcggctggtgaggcatgcacaaaangcacgggnncaggcnggcnagccaggcccctntaggcngganctgccgtcccagctgtccacaggacagtt

SEQ ID NO: 509 - DNA, 106 bp, Mus musculus
actgaggaactgctgctatgtgaggctcagggtcatggaaagagacccttggtcactcacccaagagcctaggcccaaagtgctgggttaaaaagaatttaagaag

SEQ ID NO: 510 - DNA, 211 bp, Mus musculus
  misc_feature (1)...(211): n = A,T,C or G
tggactgagatgtcccanggctctgccccgcangcaggaanatgcagccagcanacgctncagcttttcttttccaccttcaaaaactcccatagcaagcngggtttctctgtgtagccctggctgtcctggaattcactctgtagaccaggctngccctcgaactnagaaattcacctgttggggctggngagatggctcaatggggtaa

SEQ ID NO: 511 - DNA, 302 bp, Mus musculus
  misc_feature (1)...(302): n = A,T,C or G
agctcagacgcctgcagatcacgctggagntggagcccacagtnctgctaagcaganctttgccaacgagctataaacttcttttcattttacatttgtgttttgagacagaggctcgggaaattgcccaggcttggncttgaactcactcaagantnntnggagcctgcctggnnncaggttggggggnngccatggaaagatcttcctgaggaanttnncngccctcttgtcttcctaccnggcctttnncccccaagnctaggcaggtcttgnaagtnacaatcttcctggggggtttt

SEQ ID NO: 512 - DNA, 110 bp, Mus musculus
  misc_feature (1)...(110): n = A,T,C or G
cctttttaaagacttctcntnttaacaacagctctgccctaaaaccccaaggaggaaagtgaaacaaaggncttgattttgaatatagncnatttacatgggagggaagg

SEQ ID NO: 513 - DNA, 139 bp, Mus musculus
  misc_feature (1)...(139): n = A,T,C or G
caaacccagcaacttgccggaanctgacacacccctnaccctttaattccccagcggatggctggagcccgggntttcntttnccgnnggggttgaggctagccnagtntgtntagacttgctttgaaaaaatgggcga

SEQ ID NO: 514 - DNA, 189 bp, Mus musculus
  misc_feature (1)...(189): n = A,T,C or G
actgaagtggggtctttctgaggttatncgngttctgnagatagtagnagnncctnagccaagtccaaattttcctacagnacttggatgcttccggntgcggcttcnccccnttggntccacgtgggggggcaggcgttcccgcccaggtcctagcgnnggcccctncgggnagctggaatgggcggg

SEQ ID NO: 515 - DNA, 119 bp, Mus musculus
  misc_feature (1)...(119): n = A,T,C or G
taattacttattgtggaagtctnangatctgataagcatggtggcttgggtccctaaaannacctanaacctacttgtacagcctggnactaagctcttggnagttgaggcggttgacc

SEQ ID NO: 516 - DNA, 175 bp, Mus musculus
  misc_feature (1)...(175): n = A,T,C or G
accataccttataataagacnctttnggnggggcagcggntgccanaaggccttnaactccaaagcactngggaaggcaangggcngggagaatttngggnctttgcngaaaaggcctggtntacaaaggggngtccnaggggcttttccngaaanggggggggggttgaaaccc

SEQ ID NO: 517 - DNA, 220 bp, Mus musculus
  misc_feature (1)...(220): n = A,T,C or G
gatttcagaaaccgtgccctgtttttcttaaaatgtcattgcagcaagcagggtctgaagggactncttttcaccnaanagcgtctttgtcttgcaataaactttcacaanaccttgcctgaagaggctnttcccaaaacttccantggacccntaccttggtggctccaagantgggaagctgcttaaggccttttttttnnggggggatctaaggggg

SEQ ID NO: 518 - DNA, 129 bp, Mus musculus
  misc_feature (1)...(129): n = A,T,C or G
tcaggctcaataccggaattctctgncacgctgnntaggggaaaaagggggctnnnttcctacaaagccagangccttcnttcataactgacataaaatttctaanatagccagccaagcaacccttgg

SEQ ID NO: 519 - DNA, 113 bp, Mus musculus
  misc_feature (1)...(113): n = A,T,C or G
gggggatctcaacctcnnaaacttccttgancnttcaagncangtngctngctngaaaatagnaaaaggggtggnaattccctttctttggggaagacccttccttaagaaag

SEQ ID NO: 520 - DNA, 111 bp, Mus musculus
  misc_feature (1)...(111): n = A,T,C or G
aaattatgaactgtgctgcccaagggctgtctttcaaaacacaagctgacaataaaagagcctcagttccacttcatttataatttaccncggggaagatggtttctccgc

SEQ ID NO: 521 - DNA, 201 bp, Mus musculus
  misc_feature (1)...(201): n = A,T,C or G
gtatgggctggggcctnattcccctggcattctcgttggtacgtatcccaaggtttggacaaatgtttagaattttcgcttaatggggaattnttttgaangaacttttttnatttggagnaaaatttttaannggggacccctggccntnttnaaaaangtanggggnaagggggntttttttttttggggggggggggg

SEQ ID NO: 522 - DNA, 148 bp, Mus musculus
  misc_feature (1)...(148): n = A,T,C or G
gttctccaagtccctcgcctaaaaaccccggggccgnagnatcttcaaggccctttttgngcctgtttcnacacacaggntggttgccagnccnatcttttcantgagcctaaaanaaagggaggnggncccccccccatcggcgaag

SEQ ID NO: 523 - DNA, 241 bp, Mus musculus
  misc_feature (1)...(241): n = A,T,C or G
attactggcaagaatagtcctgggcncttttttttcccctcaaggggaggcttncnaccttccagnagtgtcctttaccatgcncccatgganaaatggaagannttttncatttctttcttctgggttccnaaangatctttgaaccctgaannatcccccacccagnntaaacaacaccccttgnanattaaaaatctngggggcttnggtttgggcttcccaaaaagggaccaaaaaa

SEQ ID NO: 524 - DNA, 320 bp, Mus musculus
  misc_feature (1)...(320): n = A,T,C or G
tccaaactctgggtacagagttgaataaaagaagcaacgaccttggcttnanagaggccattacaggatccatcagatcctcacacagcctgtaaaagatgtgccgctctggncctcctctcatgggtggacaaatggaggangcncanaatagatgaanacnccggcttaaagactgcacagtcaataagccgcanagccaagatttgaacccaagccangnggggntggctcatgtttggggcttgcaaaggntacaaacaaggatactttgccgnggannggaggacccccaaaaangcccgggttaattgtttcca

SEQ ID NO: 525 - DNA, 506 bp, Mus musculus
  misc_feature (1)...(506): n = A,T,C or G
gacgtctggggagctcctgcattaagtcagactgaggctgctaccagaaggtgctgtcctcatttatgtcggnccttctgcctnanacaacctggccangganncccnacacnggactgcccagcnnctcgtntgntaatgaactccagatgtanacnaggctgacaactcaaattagccatcacaataggtttcggnttncanccaactggaagcacnctgttttcttcatatatncatanggntnttagttgctgaaggataacaagcaaccgtaaaagaaaatcaggtagttgcacatgtgtccttgtgaaatgatgtctgtggtgccttgcaaactaaaggtaacatatggttactatagaatatattctcctgggctggagagatggctcagaagttaagagcaccggttgctcttccgaaggtcctgagttcaaatcccagcaaccacatggnggcttacaaccatctgtaatgagatctgatggcctcttctgttctgg

SEQ ID NO: 526 - DNA, 208 bp, Mus musculus
  misc_feature (1)...(208): n = A,T,C or G
acagcattccagctggacacagggaggggcttatgancccggccactgagggaggcactattgacagttggtggcttctgagggcagaagagtcagttttcttgaggatgtgaccctggtttgagccatcctccaggggatggcaccacaccagtgagtatgcagactgcatatattggacacattggattattgaaaaacaaataaa

SEQ ID NO: 527 - DNA, 189 bp, Mus musculus
  misc_feature (1)...(189): n = A,T,C or G
ggaagtgaaacaagtccgcataagngccttgctttaattacatttactgtggctttcctgtggacgtcagaagacaacgcacggaagtccgttctctccttccatcacgtgggagactgaaccaggttatcaggcttggtggcaagcaaaacacttgtacattaaataaataaatctttgtagaatctg

SEQ ID NO: 528 - DNA, 113 bp, Mus musculus
  misc_feature (1)...(113): n = A,T,C or G
tgaagggattgaatccaagaccttgacccatgctatgcataggccctactngggagcntcaaganaacaattactanaaaataaatcaanaatgagntttgtttccttttaaa

SEQ ID NO: 529 - DNA, 413 bp, Mus musculus
  misc_feature (1)...(413): n = A,T,C or G
gaattgttcaacttcttgaagcccgaaggtagtgaaactgaaaatctaacccaagctccttgtaatctctaatcctttaagaaggactgtgggatttgatcaagaagcccggcaacaagtagaatccacctagcaatgggtgtgatagatgagttgtaatggacatactcaaggacaagggctaacaaggaaattccgacacctaaacacaattgtaccttgacaccaattcagagcataatgaagaattctgccagtagaatttagcacgttgtgaatagcttctttgtccacatttggttgcctcaaatcgtctgggattcagggggagcacagatgntcccagctgntggaaaatgaagcttgaagttaaagccggnaaggagaaaaatacctaattcaaattccaagaa

SEQ ID NO: 530 - DNA, 100 bp, Mus musculus
  misc_feature (1)...(100): n = A,T,C or G
tccctggatggcctagnactntctatgttanaccaggcctgaccnatggacgngagaactctttaagagtattatncntacngtgactacttccttataa

SEQ ID NO: 531 - DNA, 357 bp, Mus musculus
  misc_feature (1)...(357): n = A,T,C or G
acgctggcctcgtacctgatctctctcatgngctgtanccaggngcagtganngnnccngtctagcnacccaangcngannctttatantaacatngagtatnttnttntnaaagagccnngagnncntctttngatnacancagtttaactngaaagncaactntgtgggganacggatgcatgcgaaggccagaggacaattgcaggttcttgctctctccttccattgngtagatcatgggcattgacttcagattatcaggcttctcgacgagccctttacccaatgagccacctttctaaccacgattcgttttttcttgatacacgatcgatcgngggcaggctgctgctg

SEQ ID NO: 532 - DNA, 248 bp, Mus musculus
  misc_feature (1)...(248): n = A,T,C or G
gtatcagcaatggctgaagatggtagtgaggagatcatgtttatctggtgtgaagactgcagccagtaccatgactcggagtgtcctgaactgggacctgtggtcatggtcaaggactcctttgtgctgagcagggcaaggtcctccctcccctctaacctggagatcaggcgcctggatgacggggctgaaggcgtgtttgcagtgacccagctagtcaagcgcacncaatttggtaaaaaaaaaaa

SEQ ID NO: 533 - DNA, 227 bp, Mus musculus
  misc_feature (1)...(227): n = A,T,C or G
gactgagagccctggctgttcaggaacttcctctgtacaccaggctggcctggaaatgacaaanatcagcctgcctgagtattgggatcaaaggcaacangaaaccactgtagcagtccaagttaaggtacaatancagcactctgtttagtgagatctttatagctgngcaacagactggatcagaaaaatatgactggaaacataagaatctcaaagaaaaaaaa

SEQ ID NO: 534 - DNA, 211 bp, Mus musculus
  misc_feature (1)...(211): n = A,T,C or G
agagcaggaggggaatgatggacaggngtaggaaccncttnncaacnnnnncactccagnactgctnaatgctgaggaaagggactgngatatccnagaggacgcacnnaaaatggtgactgtggtgaatacatggagangtatgggaatcactannggatggttctanatggaatgntctattctgaganacttatgactaacaatagta

SEQ ID NO: 535 - DNA, 425 bp, Mus musculus
  misc_feature (1)...(425): n = A,T,C or G
gacgtctggggagctcctgcattaagtcagactgaggtatgtgagcacactgtcgctgtcttcagacacaccagaagagggcatcggatctcattacagatggttataagccaccacgtgattggctgggaatggaactcaggaactctgaaagggcagncagngctcttaaccgccaagccatctctccagcccacaagcttcctccttctcaagggcttctgcacagcactgggcaagcagtcggtgatcanngaggtctgtgtgaggagtaagtgagaagaggcaccttgccatgctgngcaaaccaaacacagctctntttgntctcccagtcttcccaaatgattactatacgctgcctccaaactgtggcaacaggaagcattttcagataattgtgaagattaaagatatttaaattg

SEQ ID NO: 536 - DNA, 174 bp, Mus musculus
  misc_feature (1)...(174): n = A,T,C or G
gaagccgggaggagttgggngccctggaacanagttaaggatggtttnacccaccaccntgntacttggggaattgaacctggatctttccttcggagagcanccangtgcttcctaaccactggggcggtctntcnagcccttagttggggataatttttactttttattttt

SEQ ID NO: 537 - DNA, 112 bp, Mus musculus
  misc_feature (1)...(112): n = A,T,C or G
agtgtaaaacaccctcagaaaaaaantcttnacggctcggaaaacattgagagcgagcgatcgcgcgngnaggtngatgctatacacatactcannggggaccttgattaca

SEQ ID NO: 538 - DNA, 127 bp, Mus musculus
  misc_feature (1)...(127): n = A,T,C or G
ttggttacagaactattctatcataggctgggttanagnccnacnactgacaccttnaccgtancactatctannacctggggggggggggcgccnaactatgggaggtnggctttacctctctcaa

SEQ ID NO: 539 - DNA, 330 bp, Mus musculus
  misc_feature (1)...(330): n = A,T,C or G
caggtgtcgaagggctcgcggctcactcatggacaggagcaaggagttagctacagagatagcaggatcagcaactgctccttgacctaggcttgaagnggaagccttcctccctcttctactggattcaggacctggggctganacagncatcatccttagagccgagtgtncagcactgcctaaaacactagcctaagctcctgccccaacncttgcngggggggggcaggtgatatgctggcttgnaaanaaaancctgccacttggcttaannggaggccnccncccccccacccttgatgggcaggctgaaacactgcctagggg

SEQ ID NO: 540 - DNA, 107 bp, Mus musculus
  misc_feature (1)...(107): n = A,T,C or G
gactgagacagaatgtcacaaataaatcctctcctgcanttgcatattaattggatcgnagacgtcaagcatctttcattaaaganaatgntctgcaaaaaaaaaaa

SEQ ID NO: 541 - DNA, 112 bp, Mus musculus
  misc_feature (1)...(112): n = A,T,C or G
aggctttccaagatannttaatctatacagggnggttgctaantancctangctggcnttnaatcttgtttaagcctcccaagagctgggnannccgggcatgaaccaccaa

SEQ ID NO: 542 - DNA, 143 bp, Mus musculus
  misc_feature (1)...(143): n = A,T,C or G
caggacttccctgtcccatgcttttgnacggatcccgtntangaggagcctgncacccactgggatcanagctgaactgatggtcctgacaccccccccnacccatgcctttaactgatttaactctgcccaaagggttcttg

SEQ ID NO: 543 - DNA, 161 bp, Mus musculus
  misc_feature (1)...(161): n = A,T,C or G
accctgacatcaggcntgngttgtaacnatttaaacacatttancgattgcnttantcccccntttccntttaaaaacccnanancttantaaacatccttncgtttncacttttttttctgccttttagaaacnntaaccttttaaagggaaaccgtcca

SEQ ID NO: 544 - DNA, 288 bp, Mus musculus
  misc_feature (1)...(288): n = A,T,C or G
cgcttaattaatgaactcatgctngaanntattcactccaacaccaanaacnaaaactctgtcctccgggtttgnggctgaganagataaaaagcatcattttggaaagggnaagcccgtcccaattctcaaaaacaagancttcattctggaaacctcaaggcagtggcaaaatcaagatggantccccacttgcttcctgagtctgatgtgaatgancaatctttcctccnggggggnnngttttaaaaaaaaaggggaggctnaaaaancaaatccccttgaagg

SEQ ID NO: 545 - DNA, 229 bp, Mus musculus
  misc_feature (1)...(229): n = A,T,C or G
actgagaacatctattannaatgacagaaatcaagaacactgctntcagatgctgcccgggatgtgagnccacaggaacacanacgggngatgngaaaaataactgatgccntangctctccanatcgtggctcgacantgnctgngggttgnactttnancctctgnaatgaggcaatgcctcacgggcaaaccttctaattgcccagagaaccccaccatggccaaa

SEQ ID NO: 546 - DNA, 154 bp, Mus musculus
  misc_feature (1)...(154): n = A,T,C or G
gcaggcctgtaccacccaaggcctactttgtttttcagngctcgggattgaacccagacccctgtgcatgctacgtaagnnctttancacttacctcatccctcactttgtttttacttatttttaaaagcattatatctgacttctcttaagg

SEQ ID NO: 547 - DNA, 181 bp, Mus musculus
  misc_feature (1)...(181): n = A,T,C or G
acatcaatcttaggactaatcnttaaggcttattgatctgatcgganctttgttactgntacattntcctnacnattntcntattncncaaaannctattccaccatnggagcaaacanttgcnccgaaacactactcttntacacggggggggggggacccnacaataacccaccactaa

SEQ ID NO: 548 - DNA, 123 bp, Mus musculus
  misc_feature (1)...(123): n = A,T,C or G
tatagaaaaaaattatttttacaagaaccccttcagaantattcacttacatggnnggngggggctagagttnnaaaaaacattggggtttaaacttaaaccttgncacaatttaaaaaccag

SEQ ID NO: 549 - DNA, 207 bp, Mus musculus
  misc_feature (1)...(207): n = A,T,C or G
agttggaaccccttcttctgacactcctganttgtctgtcacggaggaagggagcatcgtcttgttcgaaggctgcctacagctggcaatactgccccctcagcttcctgaatgctgggatttcaagtcagtgctgccacacctggctaccacatnactttttttaaaaaagtctattcttctctgggaaccccatgaaggctgagg

SEQ ID NO: 550 - DNA, 166 bp, Mus musculus
  misc_feature (1)...(166): n = A,T,C or G
tccaatctacaacccccagatcctcttctcacttttaattttaggacancctcttcttgccaagttgcctaanctgcccttgaactcaggcccantctnnctttgaacnttggnagtcactctgcttcancctnngggggnnctttacanatctgcgcccccacac

SEQ ID NO: 551 - DNA, 230 bp, Mus musculus
  misc_feature (1)...(230): n = A,T,C or G
gactgagaatccctatgcatnttcttaggccttctggagatnaanacttcaggcctcaccattgcacaagtncttgaantggngagngactntaataccctcacggtcaccctagcattttaaggggctggaaagatggtncatcagttantagcactgacttnatgaaggttctnngttcaaatcccagcaaccacatggtggctcacagccatccgtaatgagatctg

SEQ ID NO: 552 - DNA, 311 bp, Mus musculus
  misc_feature (1)...(311): n = A,T,C or G
gggaaaagactgaactactctccntttgtgtaagaacatcccgaatgaattcgttctaggtaagtgtattgcaggtaaatcctataagtgngcaggngaagtgcctgtggagaacagaggagggcgccagaccccttgggctgcatggaaggcaattacaaatgcccaatgtagtctggaaaccgaacttgggacgcatggaaaagcagccaatgctcatgatgggctgagccatctctccaggctggggggggtggtttctttttactttctgaaataaactctcattttttaactcccaaaaaaaaaaa

SEQ ID NO: 553 - DNA, 175 bp, Mus musculus
  misc_feature (1)...(175): n = A,T,C or G
gaatagcctccactgngtaactttaatataaaagantttatgcacctccnaagtncaacttttnntaataatctcnnccaccagnacaccttttttgtggtagngggggngcttacctaatccaaggggctncgcaacantnnacngtgttaatctanctcatacccacccctca

SEQ ID NO: 554 - DNA, 123 bp, Mus musculus
  misc_feature (1)...(123): n = A,T,C or G
agactgaactctatgcaaanagctgctctgacagcacagacttgtgtaccactgtgccatggaaggaaagantgccatatnattaagcttgtggttattcaccncacccatttgtgccaaata

SEQ ID NO: 555 - DNA, 216 bp, Mus musculus
  misc_feature (1)...(216): n = A,T,C or G
cactatgaaaacaccctccggcccgatgagtaagcngngcatgcccaagccctttnggattcgggcctgtttcttccgcangtnacttacnttccaaatatctagncactcttttaagcgacgagaattgaagccagccaagactngggctctaccactaagctatattctaacccctcatctaataaatgtgtatttggattttaaaaaaaaaaa

SEQ ID NO: 556 - DNA, 165 bp, Mus musculus
  misc_feature (1)...(165): n = A,T,C or G
tcttctggacccaactctggaatacgtgaaganncggcctggatctgancntanccaaggcggngcgagctganaattacntcattttgcntngcttcctcccagcttggantcccaggtngctngcanactaagacaccatggcgattatttggattaaaataa

SEQ ID NO: 557 - DNA, 126 bp, Mus musculus
  misc_feature (1)...(126): n = A,T,C or G
attcttccataagagaagtgtcaagggtcttcctccgctggatcctctgagatcatcacattactgagctctgggggaactcacattccacatgattngggnacttagncctttcctactgggaag

SEQ ID NO: 558 - DNA, 217 bp, Mus musculus
  misc_feature (1)...(217): n = A,T,C or G
gatctctgcctcctcantggngtagacgccctcgtgctnactacattccnaccangaagannccaagctnctgagactgngnnttgagactccncagggccaaccttacccancgtatactcaaagatataaccagtctcagggtcatggaaantctgaggcaagggacnggctagganncggatgacaaactggcatntnagaactgggctaagat

SEQ ID NO: 559 - DNA, 229 bp, Mus musculus
  misc_feature (1)...(229): n = A,T,C or G
ttgccatgcctgatcctaagaagcattncgaagccgtgaatccaanccgtgatttcagccataccagcttattagacaatgaaaaactgttaacacttgacaaacttggacagttcctctgatgatnatattantgatgannaattttatgatgatnnttcagaagnatattnggnggaantgggccattccaggnatgatgtatggaagcaggaggacaggagtcgcc

SEQ ID NO: 560 - DNA, 176 bp, Mus musculus
  misc_feature (1)...(176): n = A,T,C or G
gactgaggggctggagagaaactcaacngcctaagtagcactgactgctctnttggnggggnatgagttaaaatccctncaatcacnnggngggtgacaaccatctgnaatgaanatcggatgccttcttcctgnttgtgactgatacagggcgtaacgnaataataaaataaaat

SEQ ID NO: 561 - DNA, 194 bp, Mus musculus
  misc_feature (1)...(194): n = A,T,C or G
agctcactagataaccanaatctntccttcccaaaccttttcagtancgntcaaatntcttggaangatcttccagccacngtnagtncccaacattcttttttatttaggggngggntacttgnggnnaccatctctntatataaggggntttnaaaagaanaactaaataaagganccccccccctaagaaa

SEQ ID NO: 562 - DNA, 147 bp, Mus musculus
  misc_feature (1)...(147): n = A,T,C or G
gactgagagcagctatttctgggaggccaagaaggatgacttgctgaagcactgaggttaaacatgattgcatcatggtgnttctgtctttccttgtgtgcctatgtgtacaggcaagagaataacctcagaggccaaaaaaaaaaa

SEQ ID NO: 563 - DNA, 226 bp, Mus musculus
  misc_feature (1)...(226): n = A,T,C or G
agactgaggtgggtttgggctgagnagacctgggcactatgccataantactncntgcggactctcacaggtcggacagnangnntggcctggtnccatntctccagcacgccccatgtggggctctctcagtagccttccntacaactacactggttccttggtagcntcanaggaagacagggactnttggtcactacccaggaacttttcaacctattacagt

SEQ ID NO: 564 - DNA, 171 bp, Mus musculus
  misc_feature (1)...(171): n = A,T,C or G
actgaggggggataggtactgncgccataccccggnctgaancccngnttgctntgtngggggagactctcngnngtntcacagtnccacgcnccactgatgnaancctggaggagccncacacgagcnccttttatactgggaccagaagattattccgggggggaataa

SEQ ID NO: 565 - DNA, 193 bp, Mus musculus
  misc_feature (1)...(193): n = A,T,C or G
ttcctgactctgcctccnaagtgctggcattagagacatcccaccatgaaantnacnagttctgggaaccgaggcccttctggaagaatggccagngttnaggcgcatccttaaagaaaaatacattactgtanggtgtatgnattngcactnggancacaggaatgcatgcgtgcatgctttgcatgctctg

SEQ ID NO: 566 - DNA, 151 bp, Mus musculus
  misc_feature (1)...(151): n = A,T,C or G
ccctggcaatagcttggaccatgcgcagacatccacatgatctccagtgtcagcacatgacnaggacctccaccgggnaaccctggtgacatcacnggaccanggacatcaacacagccctttgccaaagcaccagccacggacaccaaca

SEQ ID NO: 567 - DNA, 149 bp, Mus musculus
  misc_feature (1)...(149): n = A,T,C or G
tcctgcagattgtctgcgttnncatgcgattcntanccanggngggtntttttaccngacaagcttacaccagacctgtttctagntncaaaaanatggnttcgtttttgccctcaganaatacgctttactcagtgcttggagaaggg

SEQ ID NO: 568 - DNA, 330 bp, Mus musculus
  misc_feature (1)...(330): n = A,T,C or G
actgaggaaaacactggctaggtatttttggcaccgtttcttcagtgagtagatattgcctgttcaagaacctttgtctcacagcacgtcagcacagttctatttcggaatggagcagtcaaagaaaagatgtcagcaaagatgcttgactgaccctgccgctcttgtgctccgaagggaagggaaactgcagtgttgtcanacctgccatcttntacgtggggctatgccaccctcctggnngngntcagctcgggcttgncctggtccaggattggnnnanaattggccagnaattngaagctctggtcncccaggccctcttttgtt

SEQ ID NO: 569 - DNA, 111 bp, Mus musculus
  misc_feature (1)...(111): n = A,T,C or G
aaaaatggttttctggaancatagganctgcagatgttaaactgattttctgggctggcccgggaggacccnggcntngnagcccnggatngggtctttccttgcttggcc

SEQ ID NO: 570 - DNA, 145 bp, Mus musculus
  misc_feature (1)...(145): n = A,T,C or G
gtgggaagttcattcattcaccagcgatntgtcctgcttgaagnagnacccttnctggaaagctaganattggngcnaacagaactcattccnntcaccaggnggcgaaagctattgnaaactggcanggcttaccaccaaaggg

SEQ ID NO: 571 - DNA, 119 bp, Mus musculus
  misc_feature (1)...(119): n = A,T,C or G
cagaacctgtgcatgcccggttatgaggngagcattgggactagctcgcngaatgcacatnancagctttggcaggaaatttntgnaaagccgtggtggaantgttggggttaaagagg

SEQ ID NO: 572 - DNA, 120 bp, Mus musculus
  misc_feature (1)...(120): n = A,T,C or G
taactgggtgtgatacaagggcacatgggaaccttctagagtgctggggtagtcacatctagatctgcccaagttcatggngccttataaacaaacctgtgcagtatcttaaaaaaaaaa

SEQ ID NO: 573 - DNA, 104 bp, Mus musculus
  misc_feature (1)...(104): n = A,T,C or G
gcctgctcctttgagantaatggtagntgngaagacgggctntgatntccttttccatgcctnatattngtgnccagggangaacagcctaccctgaacccagc

SEQ ID NO: 574 - DNA, 515 bp, Mus musculus
  misc_feature (1)...(515): n = A,T,C or G
gactgaggactcttttctccaagtaaattgctggagtccattgccaggctatcctaaacaccagtggcagaagacattttcataaagcccccaatgatttcctcaactgcctttctaatcagctaaacaactaagtctgacttcgcctcaagtatattttactactctttgttttagggtaagttggtggtcttagtagagcactttgagtttggttaaaaattaacagttgcaaatttagaaacactgttaccttaggcactgccatcttagaagcctaggagtcagggggatcctggacaccacaagaaaacaacccacagcatcaactaagcagggctcataggcgctcacagaaactgaagcggctagcacagggcctacgtgtgtctgtgctaggttctctgtgtatgtgttatggttgtgtagcttggtggtcttgtanaagttgntttcttaggtaaatgttatttggttaatattggaataaaactaagaaaccttaaaaaaaaaaa

SEQ ID NO: 575 - DNA, 172 bp, Mus musculus
  misc_feature (1)...(172): n = A,T,C or G
catacattggcaaaantgactggaggtggctgnccagntgactcatccgttaacggagcctggtgtgcgtntttncacaanagctcccaccangccttcnccatngttnagaggcatgctttaactctattccaggaggccccaanaagntctttcctcctctgtggggcct

SEQ ID NO: 576 - DNA, 105 bp, Mus musculus
  misc_feature (1)...(105): n = A,T,C or G
gctccctctttactgtacangcctaagcatcaaacantaatcccnaanacaccanacccacttggctgctagngnacatggctcctttnttcacgaacacggacc

SEQ ID NO: 577 - DNA, 159 bp, Mus musculus
  misc_feature (1)...(159): n = A,T,C or G
cctaaatccagggggggatanagtgnatcctacntgtgggggctgtatgagcaagacaancnatggtaatnggtggnctntgttttanttcatgtctgtagggttnntgccttgagttgctactttaattnccctgtnacctgtaagccaagagctaaa

SEQ ID NO: 578 - DNA, 114 bp, Mus musculus
  misc_feature (1)...(114): n = A,T,C or G
tggcaagaccagggcacnnnctgtggagctaagagctgtannctctaagtcntnccaagcaggttctttgnnaacgcgcnttacnccggtgcctcccagctctcctgaagcaca

SEQ ID NO: 579 - DNA, 105 bp, Mus musculus
  misc_feature (1)...(105): n = A,T,C or G
gactgaggattttaacagtgggaggaaaagaaagccggaatganaagaatggagagagctccgggcctgagaagcagctgccatggaggctgaggagacaaggat

SEQ ID NO: 580 - DNA, 148 bp, Mus musculus
  misc_feature (1)...(148): n = A,T,C or G
gactgagcctatagtcccaagctggtatgaaattcactatgtaaccntgaatgacctctaactcgctgtctcaaccttntgattgcttgattcctggnaagagccacnattcngntcacacgatgttgcgtaacactgaagagcctgc

SEQ ID NO: 581 - DNA, 105 bp, Mus musculus
  misc_feature (1)...(105): n = A,T,C or G
accccgcctgttaggnnctnaagatatcngagcgctttgaaanggnggnatcgtttangattttgaggattttcgaattccanttgagagattgacatctccaat

SEQ ID NO: 582 - DNA, 144 bp, Mus musculus
  misc_feature (1)...(144): n = A,T,C or G
tttctgctaaccagattgngaaanaaagaccctcaggactcttttatntcctccctttcaaaaggganactaggcgaanagggatggccagngcccgtttgggaataatctttttggaaanganttgaacagggaacgccttta

SEQ ID NO: 583 - DNA, 226 bp, Mus musculus
  misc_feature (1)...(226): n = A,T,C or G
gtagtctcccctcccccagcgctgaacctgcttgctnggggtggagcttcctgctcattcgttctgcncgcccactgcttggaacctgaggagccacacacgtgcacctttntactgnaccagagattatatcngcgggnaatcgggntccccntccccttcctnnataactgggggnngncaccaataaaantttgagccctttggaccaagagtaaaaaaaaaa

SEQ ID NO: 584 - DNA, 121 bp, Mus musculus
  misc_feature (1)...(121): n = A,T,C or G
aggactggaagtgctccccagantgcagaaaaagagcattagactccctgggagctggagtttcanatgctgagacccttccttggatggcnggggaggaaaattgccaggtcccttttgg

SEQ ID NO: 585 - DNA, 215 bp, Mus musculus
  misc_feature (1)...(215): n = A,T,C or G
gatagttgtgagcccaccatggctggggaatgaacctcagggacctcttggaaanatcaattcagtgccctttaaccccaagagcccnttntcttccagnggcttgaagtcantttttntttttttttgnggattattcaaaagccacctggaaccggnggttttnaaaaaaaaagcccccgggccaggggncctgggnttttttcttggggggc

SEQ ID NO: 586 - DNA, 378 bp, Mus musculus
  misc_feature (1)...(378): n = A,T,C or G
gaggtggggagcccctccttcnccttnggcagtcacgagcgnggatgctcttgccaggcaccagttgagctctcggctccttcgtagggatggancccacatccnattctgttctagatntgggactcctggcttgaacccgggcaggccctgancctgcnccacagccttatgcnaacacagctcatnagtccttttggggcctggcgaccgcaatgaaaggccttccangggttttgcttntnggctggggggctcacttcctctgaggccnagnnaccnaaacaccnccangaaggggnaaaggcancnctaggaaaaccttaaancttttatnacntttaaggtttcccagccccnancctttttaattggcat

SEQ ID NO: 587 - DNA, 124 bp, Mus musculus
  misc_feature (1)...(124): n = A,T,C or G
ttcacgtgcgctggacnaacccagatactnaagcacttggttctgtcatggngncatttcantanatncanactnaaatacaataggccngaactttggactggggnctgactccagggaacac

SEQ ID NO: 588 - DNA, 107 bp, Mus musculus
  misc_feature (1)...(107): n = A,T,C or G
cttgggtgcaaaccgccttgactatttcaaggnanactgtgntgaagcttctgcccaancaatatggtngntggaatcctncccccttnttggtggagagggcctga

SEQ ID NO: 589 - DNA, 289 bp, Mus musculus
  misc_feature (1)...(289): n = A,T,C or G
ggctttttcacaaaaancctgtgatngcagggctattccnagacagagacctgccanagcacaattgcncanacncnggntcccgttnctcatgcatgctgcacatatgcctcgcttcctgcaccggnncctcagaggcttcctctgaacagncctaggctcttgttccaagatggccctgctgcttgnactcagggagggtgccttccctggagcaccagcctggggcactagtctgggggtttctccgngnagccctgggtgatcctggcactcactttggaaacca

SEQ ID NO: 590 - DNA, 249 bp, Mus musculus
  misc_feature (1)...(249): n = A,T,C or G
agactgagctcattgggagnctctattgaagacattgtcaaagttctagagacatggaagggagtgctctattcagacggngaccttgttggagaagnggatcactctgccctttnancccactcagggcaaacaaaccctcctattgntctctgaaaacagtctnttcctggctgctttggatcaagangnaaaactctcagctcctttttcagatggggngnggctgcatgcctaccatgcttcctg

SEQ ID NO: 591 - DNA, 304 bp, Mus musculus
  misc_feature (1)...(304): n = A,T,C or G
actgaggtatagcttgtgnaccgactgtgtncgaccatgcacatcttggncatgctttgctcctatgttaanattngacattatncggaggatcctgcccnnagtgtttgaatgcaatgtggtcatggcaaatnaccattaccccgacgtgantgacaaaataattcaagaganctaccgaggnancaccctccctcnnatttgaccgaaaagcctnttggttaaancgggccntnccctgnccgnngctaggnnaaatgtattcccnannaccttnggaccctttataggggccccaaaaacc

SEQ ID NO: 592 - DNA, 176 bp, Mus musculus
  misc_feature (1)...(176): n = A,T,C or G
gaggtcttcttcctgaaattatgttaagagattctcatggattttnacttaaaaattacaagaaccccgaaggtcgagcntccntaganagttgccatagaagacttgcccagnggggggancttgcttcaanggggcactgactggcccggaaccttgtattctggggcaaatta

SEQ ID NO: 593 - DNA, 242 bp, Mus musculus
  misc_feature (1)...(242): n = A,T,C or G
aatctgaggaactgttggctgtctgacctgccattctctacatgtgatccatgaagattctggagagatgtcttcccaggaataatatntagtgtgtgattgctttcctaaagtcaggcggttttccccaagagancttcccanatgagangancctgaccaaacacccatttctatacaagacnacagcagagggataaagattatattagccaatatcagnggntctcattcccagctac

SEQ ID NO: 594 - DNA, 358 bp, Mus musculus
  misc_feature (1)...(358): n = A,T,C or G
actgagaacggagaggttcgcttctcttggtgctgtcacgaagatgaatacaacctcatggcctcccccagctaggcgtggcctttggagattgggccatcaacattttctcctacactgctcttctttgggaaagcacaaagtgaagatgaaagacacngtggaagaggaaattggcacttgatggattgaatatatagtcacttatttattacacttcttagaattnaggtataagtgctttgacttttgcaagctgggagaaagagatttcacttagataatgctctcaaggggatggttaccatacctgngngngaaagngaaggtnctaaacaaaatacgttaaaaaaaaaaa

SEQ ID NO: 595 - DNA, 118 bp, Mus musculus
  misc_feature (1)...(118): n = A,T,C or G
tgtccacgcaaaacanagcngattttggcagctaagggnagccttnacatgatttttcaggggngtnctttgactngggagaaaaatcttgatcngttggaaccagaaaaccttttgg

SEQ ID NO: 596 - DNA, 147 bp, Mus musculus
  misc_feature (1)...(147): n = A,T,C or G
tgaaaataaagcctcagaatgttcctgaagaaaaagnatttcctttgggggannanngggnggggatntcncaagaagggggctcccctggcttnccccctttttaggggggaanaatggggggnctggngaaaaacccagggaaaa

SEQ ID NO: 597 - DNA, 267 bp, Mus musculus
  misc_feature (1)...(267): n = A,T,C or G
agactgaagaaccgcccanatacttagatcttccccgtgcanatcactgcagctgtcagatgagatgattgcgattactaacgacttgggggaacgtagaggtttactgctctgcttgttcttcttcatacaacagngctgggganggagtctccttcagntaatgcctncnggccgcacagtttcttggaaaacagaanctnttgccccaactaatttnncngtttctaagntttcccagggggggggggggggagaaaccatgtt

SEQ ID NO: 598 - DNA, 129 bp, Mus musculus
  misc_feature (1)...(129): n = A,T,C or G
aggtgatcttagccctgancatctcacgagctgggggngggagtncttnccctgcctttaccctgtcctgngcaaagggatnaantgaatgnctaaaaaggaaacccccctctgtaaagatctacaggc

SEQ ID NO: 599 - DNA, 132 bp, Mus musculus
  misc_feature (1)...(132): n = A,T,C or G
tccctttggttcctggttcccgcntacgggtgcttngagaagnanngangaagggggntcccttcacgggnaaacaaggacatngatcccagggaggancctnnggggggccggttctttttttaaagggtt

SEQ ID NO: 600 - DNA, 136 bp, Mus musculus
  misc_feature (1)...(136): n = A,T,C or G
acccagaactatgctctctgccccnactccnacatcctgggaacctncaggagcannattgtcccggngaaagggcagtaatnaaggcctntnttaanttttttcctcnatntgcccaaaaaaaaaagggtaaggg

SEQ ID NO: 601 - DNA, 231 bp, Mus musculus
  misc_feature (1)...(231): n = A,T,C or G
aagactgaggtggagttggaaggaagttcttgagatgagaaattgtacagaagagcaaaaaagtgactctcagntatnttgggggggcatntcntaaaaatgttttgggagcactgnaaatcgcntancaggtaaggactcttccccaaaccttgatggcctnantttattncccanacctcaacggnggnnaaagaaaagattgatttgncctctgcctctatacaaatt

SEQ ID NO: 602 - DNA, 180 bp, Mus musculus
  misc_feature (1)...(180): n = A,T,C or G
gatgctgtgaacactcangttgtgctgngaacnnggaaagacccttttcctggggagggntgcgatggacacgtcanccggaggcttttgatnctattacgtactaaagantgttatggtgccnagaattaacatngggnaatcnangccnccccatgggncaaggggtttgtcccccca

SEQ ID NO: 603 - DNA, 177 bp, Mus musculus
  misc_feature (1)...(177): n = A,T,C or G
attcgccacaaaccgcaagcagggcagnngctgancnccttttcaaaaacaatattaagccnnnttacagccaggngaaaaaccntggtgacggcatgcatccttcggngggcatgaaaaacctctggaaaggncancaaaactctcgctgccaggggaangacttaaaaaccgact

SEQ ID NO: 604 - DNA, 102 bp, Mus musculus
  misc_feature (1)...(102): n = A,T,C or G
attgtaacagccctgagaanctggggctaccctttgaagagganagatgcncncctttcagttcantanttaaaggtctatttaaaaagccaaaaaaaaaaa

SEQ ID NO: 605 - DNA, 264 bp, Mus musculus
  misc_feature (1)...(264): n = A,T,C or G
cccaaatggctatgagatcataggctgtgancccatgantnacccatagngacaatgacatgnagatnaagganctgaancgncatacactntgcagcataanngtatgcacaagctnttanngagacttgtgantacatngccngngctctcccgcntgggctgttaacaaccgtctgaaaactggagctctggctcttnacatacctgcctcacaagactggtaaaaataaagtcanctgaggggctagagaagatggctca

SEQ ID NO: 606 - DNA, 403 bp, Mus musculus
  misc_feature (1)...(403): n = A,T,C or G
tagcccagacctctgtagctgagancaggaggatgaccncagncaaggccatactggacatcaaactgagaccntgtctcaacngagaaacaccagcctgatgccatatgcctggcanatacagaagcccatgctgactgtnatctattggatggaacacagggccccnaatgaaggagctanagaaagtacccaaggagctgaaggggtctgcagccctataggaggancagctatatgaactaaccagtacccccagagattgngtctctagctgcatatgtagcaaaggatggcttagttggccatcaatgggaggagaggcccttggtcttggtgaaaattctatgccccagtataggggaatgccagggccaggaagcgggagtgggtggattgggga

SEQ ID NO: 607 - DNA, 264 bp, Mus musculus
  misc_feature (1)...(264): n = A,T,C or G
tgaagtcatctatggtatcacgaaggcggnagatggnagccatccacanttgcagcccaaggctgggnngnnccaggatctncttgntnttctaaaaagnccccgtggcanacatnntttgtagctnagacaaaaggatgnnccatctagagactgccatattccgaggatccatcccataatcagcttccaaacgcttgacaccatntgcacacacttaccaagatntggggtgaaaaggacccanatatagcttgcctcttg

SEQ ID NO: 608 - DNA, 178 bp, Mus musculus
gactgagatgtggaaccgagaacggcatggcagtgagtgatgacgacaggccaggtgacccagcactggagtgcctctcactccttaggacactctgcctggattggcctgtcatctctccctggctcatctcagctggagaatctagtggcagctggccaacttgttaggggtcgag

SEQ ID NO: 609 - DNA, 127 bp, Mus musculus
  misc_feature (1)...(127): n = A,T,C or G
gactgaggttcctgaactgacttcttcaattatggaactntaagctgaantaaaatctttnctccccaaggtgctnttggnctatcncagntacagaaaagnantaaagtttccttcttcactcaaa

SEQ ID NO: 610 - DNA, 241 bp, Mus musculus
  misc_feature (1)...(241): n = A,T,C or G
actgagaccttgggcctcctanntcgtacaaacaaacaagagaagcctgactggacggaaggacggaaggagggggagcagacggacgtgaccaaaagccctgtgaactctaggaaagcagcctgggtgagggagggccctcacaacccctcccttgtctttttagaaatcaaaaagacccgattgaatgtttttggttttttttaggtacacaatgagagcataggcaaaaaaagaaaca

SEQ ID NO: 611 - DNA, 163 bp, Mus musculus
  misc_feature (1)...(163): n = A,T,C or G
cagcctacaggatggactnccanttnctgcctgctngctgtgggagcagggcctccaagagcccatggctgngggcaggaatgggaaggcagaaaatgggctgagtatcttattctctgccatgttactgtttacatatttctgtgaatatgagaactaataa

SEQ ID NO: 612 - DNA, 399 bp, Mus musculus
  misc_feature (1)...(399): n = A,T,C or G
atcctttttgactgatttcccaaattgccgagcatccaaagaanaggcnnatcagagaccagggtaattctcaagacnnncctgatagacaaggactcacatggggccaacatgaattgcagaancnaaagccaccnctgaatcttgncccatcatctgaccccctgaagngacgnntctgggtctttcanaaancacgcttnagagacngggngcccagggatacnggtcantaccagagacttggtgtananactacaccagccagcacatgctgcctcgatctctccagccacattcagaggaaggnagaaggnccggngggaggcttttnaggaggacnctcnaccgcataccagctngcagtctcgatcagcagtnngagattggccagccgct

SEQ ID NO: 613 - DNA, 210 bp, Mus musculus
  misc_feature (1)...(210): n = A,T,C or G
gactgaggagagagccagngaaggccacagggtncatgtggaggtcacagatgacagacancttctggaaatcggatttctccttccactatgtttaccttgaaattcaaactcaagnngtncgctttggcagctggcacttctaccacagagccactgnntcagttcctccaagtcccctaacactggagaagaagaagaaaaacaaaa

SEQ ID NO: 614 - DNA, 540 bp, Mus musculus
  misc_feature (1)...(540): n = A,T,C or G
actgaggcctcctcagagccgtccttnccatgaggggtgtacatctctgccgcttccaattcagttcaacttcttatgtaaagcatgctgcagcgacccactaaactgatttcacaccagagaacaggtcgccacccgcagtgcagaacgtcctatcccaacccccacagctgcccaggcaaggcgggggacaggctaaacagcaagatttcaagggaagagctcccaaggctgcagcctgcacccacccgagaagctaggtccctgaccttcagacccatgggaacctggatgtttctgggaaagaggcatttgctggagggagcaaaggtttgtgtgtcctggtgcagctcatctaactaactcatctctctcgngaacactactgatggattggaaagtgccccactcaccctggggagcccttattctcagcttcatgttgncccttacaacctgacaccccagtgtcctgatccccactgctcacagcaatatcagtggttgagactacagntgagtatccataattcaagatgc

SEQ ID NO: 615 - DNA, 514 bp, Mus musculus
  misc_feature (1)...(514): n = A,T,C or G
gtgcctatcccagctgttcggtntttgactgatttcccaaattgccgagcatccaaagaagaggcctatcaaagaccagggtanttntcntgacngccctgatgacaaggactccatggggccancatganttgnatgaagcaanagccacgctgaatntgccccatcatntgacccnctgaantgacgtcntggntctttgaganatcacgcttnnganacngggatcccagggatacggtcagtnccaccagacttggtgtagagactacaccagccagaacatgcttgcctaggtctgtccagccacattcagaggatggaagaaggcnngaaggnggcttcaaggaggacaccaaccgcataccagntggagtctgancanagttgagattgccagtgctagactcctgcccttaaaccgttctgtgggcnttttttgaacactncaccctngccttgntttgctncttagagggcccgtcttttgaaagtgctgaaggatagggcttta

SEQ ID NO: 616 - DNA, 294 bp, Mus musculus
  misc_feature (1)...(294): n = A,T,C or G
gactgaggggaaggcatgaatgcccggncatatgtggagatcagaggacagcgttcacgagtccttcaaaaacagccctccctttctgcagagatcacaactatggcccatgcacgccaggctagcactttaccactgagccatgcctgcagcccattcattatctggcccggtgtcaggtgatatcatccngtgtattcatatgccaaacttatcatgtngnacactttaaatatatgctgtntatagcatgtcaattaaaccccagcaaaatataaatgtacatcacattaa

SEQ ID NO: 617 - DNA, 175 bp, Mus musculus
  misc_feature (1)...(175): n = A,T,C or G
actgagggctggagagatggctcancaggtaagncactggctggctcttcaaagggtccctgagttnaaatccccagcaacccacacggggggcttcaaaaccntcttgaaatgnagatnctngangccccttctttctggaagtggtctgaaanacagtttcaaggtgacttta

SEQ ID NO: 618 - DNA, 266 bp, Mus musculus
  misc_feature (1)...(266): n = A,T,C or G
gaactgagagtcccttcagccctctaggcttgccagaatgcaacttcagagcacagcagtgtgtcctctgcccactgtancccaatgcctgcctgcccagaaccctagagaaaactcaggtgtgaatatcctcggtgcctgacatttgccacnaagaaggctgattaaaancacagagcccagttgaagtcgngctatataatagatgangaccttaaacttgggatcctctggcccccgaaaaatcntctctaccagccccagaa

SEQ ID NO: 619 - DNA, 382 bp, Mus musculus
  misc_feature (1)...(382): n = A,T,C or G
actgagatcctgtagggctgggagtcgactgcaaaggagagacgaaaattctttggtcatggcacaacttttatccccgctgttatgctgncacttggcaaacacccaacaccacgacccttgtgaaacgccaggctgcgcgctgtttaccattggnggcttgtgcactgtttaacggttggcttcggaaatnaccccactgcccgttccccccggggatgaactcttgtctgaaaacatctatnggggntggaagggggcaacagcnctcctaaagngggaactttcagattatcgaancnggttgnacttaaaaaggatgcgnccatgtctccactgggaaatccatnantcttcnactgnnccgaaaaaaaggggatgg

SEQ ID NO: 620 - DNA, 250 bp, Mus musculus
  misc_feature (1)...(250): n = A,T,C or G
ccttgtgtgagagacacnaccaaangagnacnaactnnctaggngagacaggatcgacccgccttcaacgtaggatggctcctcccagngtgtgnatggctccacccagtgtctgtgggccagaggaataaaggagaanaggaaagaagccntttctccttcggnttcctggaggccatgaaggaanancactgtcccaccacaccttnccaatacagngggactggaaacaaaatcaaaattgaatttt

SEQ ID NO: 621 - DNA, 266 bp, Mus musculus
  misc_feature (1)...(266): n = A,T,C or G
actgaggagttgctttcacacagtganagagaaaagtctgtgctggncagatgactcggnggataaagatgtttgttaccanccctgatgacctgagttccaccctgaagccccacgtagtanganacaactganagcctctgacttccacatgcatgcactttgnagnaagtntgcaacaccccaccctaccaatgagagattggatgaatannnanttngctaaatagtatanaacananccacnataaccttgagagaatggc

SEQ ID NO: 622 - DNA, 246 bp, Mus musculus
  misc_feature (1)...(246): n = A,T,C or G
gaattcacaaagctagaaggaaaatttggattcgacccaaaggntcagnttaccgtgaagngaccttctcctccaaagggactnatccagctnntagntttcctggggggntattaccccatccaggnggcgggaaattgtnaactttcttagctttngaggnactggcgactttcacccnctnnngctttggccattcttngcatgaacttgaccnatngnagcaaaggggccttaaaaaaatgc

SEQ ID NO: 623 - DNA, 126 bp, Mus musculus
  misc_feature (1)...(126): n = A,T,C or G
gtagccttagagcgtgaacgtgcctggccccctgccatggctgcaggagtgnagccagggtgtgtactgcagcccagagggaggagcctcacactcttctgcaaaaagattccagggaggaaatcc

SEQ ID NO: 624 - DNA, 277 bp, Mus musculus
  misc_feature (1)...(277): n = A,T,C or G
gactgaggtaatgtggacatcacagtaaatgacgatgagccacagntgngacttcccagctcctgctccccattgggtntcagccctccgtgtgttccctagctcacttgtgttggagtacagtaagtagtctaggattgaggaagnctgggtagaactgaaaaaaccctgcacacactcctgccagcttccttagcagtaggttatttacctcagcagatnttaacaagcacaagccnctnctggncctataaataaaactgtcaagccaaccata

SEQ ID NO: 625 - DNA, 195 bp, Mus musculus
acacttcttcacgttgctgaggccatgtgccttcatttttgtctttagaggcctacattacaggtcttaagcacccaatgttcccaagtagaaatatggcactctgatagcattcaaaagaagatttatattactatatacatttaatgggattttaaacagactccatagattttaaagcattttttcaccata

SEQ ID NO: 626 - DNA, 258 bp, Mus musculus
  misc_feature (1)...(258): n = A,T,C or G
attgtgccagataccttatgatattccagctgattctggcgtcttccgttgactngggccanttcgatggagacttgcngttnctgctaggatnttgncctgctactgatncatgggngnagtttnctattggactggactggtagcacctaacaaaacaaagagtggatctctccaggtaactncttctaaacanntcccaatacccttttccntatnaaacctncttttgnncggctactttatgtttgggagggt

SEQ ID NO: 627 - DNA, 347 bp, Mus musculus
  misc_feature (1)...(347): n = A,T,C or G
gactgagggctggagatgcanctcacctggccaaaantgngcctagcatgcactctgggatttgatccccaactntgtatagcangtgngatgctccatgcctgnaaccccanaacccacgaggccnagaggangannatcagnaagttcaaggccggtgctggtgagatggctnagnnngnnanancacccgcctgctcttccgaaggnntggagttcaaatcccagcaaccacatggtgggctcacaaccatctgtaacaggatctgacgccctcttctggagtgtctgaagacggctacaatgtacttacatataataaataaataaatctttaaaaaaaaaaa

SEQ ID NO: 628 - DNA, 145 bp, Mus musculus
  misc_feature (1)...(145): n = A,T,C or G
actgaggctaccatgcctacagctggtaccaagaagaaggctcccncaccgcaanntttnttgttaacaagcgaatcatatnngcaggggggntttttaaccgggnaagntnaaaacaaactggtttccgttcaaaaaaagatgg

SEQ ID NO: 629 - DNA, 116 bp, Mus musculus
  misc_feature (1)...(116): n = A,T,C or G
gtacacctgcacagaacctaattacttnttntggactctanaggtcggacagnaagnggagagcacnatatatcnnctgcctcgnttcgatgaatnccacctcggtccccggctat

SEQ ID NO: 630 - DNA, 232 bp, Mus musculus
  misc_feature (1)...(232): n = A,T,C or G
gactgaggctcctactctgcagcctataaggaactcaattttgcagcctgngaataccagcactgcgcacctccatgcctggnccgntgtgtaggtttcattgactctgcacgtacagcccaaagngccccgccttccctgcccaagctctgggaaccagccattccaagaagtctgtggctgacttgggattttaccaagactagagactagaatgatgaaaacaaaataa

SEQ ID NO: 631 - DNA, 171 bp, Mus musculus
  misc_feature (1)...(171): n = A,T,C or G
aatatagcattgcgccncaggtcaagcacagttttccaatttcaaacaaatttgaaaccttgacaaatgctgtcacctgaagaaaaccttgtttttttgcttgtttgttngtttttaanaanatcatttattctttgttaacctcataaatacatacaatgtatctttgaa

SEQ ID NO: 632 - DNA, 240 bp, Mus musculus
  misc_feature (1)...(240): n = A,T,C or G
aggatgaagttccaaantgggcaggaaacccccttgganccttcnncctcgggcctggtgncccttccattacgggcntaagnagcttgggagngggggagggaccattgggnggcnattctttttgcnaaagggttntnaaacaaagggcnttncttgaaaanttggaacctttggtttaannacttgagggttggcccaaaatttttttgtaaagnaaanaacctttccccaacccct

SEQ ID NO: 633 - DNA, 120 bp, Mus musculus
  misc_feature (1)...(120): n = A,T,C or G
ttactaaaattttttgcttctnataaatctacatgganataagcccaaatggatgcntggggaanctactttnctttaatggggaaaagcgggtttttaccagggaataaaaacctggat

SEQ ID NO: 634 - DNA, 227 bp, Mus musculus
  misc_feature (1)...(227): n = A,T,C or G
actgaggagtctggagcaggaggatcttganttcanggccagcctggggaanangggctacttaaaatntggngcgcnngagnnggnaangaccagagatanccntggccaannatgcngctaccccgttcacangacgcccaacttncaccagtagcatttcaccggcacancacattatctgaagcncaccccctgnagaaccaaaacccttggaaaaaaaaaaa

SEQ ID NO: 635 - DNA, 112 bp, Mus musculus
  misc_feature (1)...(112): n = A,T,C or G
aacctacaaacatagagngcctntgacnacacgcattgcnaagcanggacatgaagtntnccttgantaatgttccccgaagaaaangccgaatgacctttggagaaagacc

SEQ ID NO: 636 - DNA, 110 bp, Mus musculus
gcaggagctattggatctctgtgagttcaagaccggccaaatcttcaaagaaagttccagaacagacaaggtgacacagtgagcctttatttatctcaaaataaataaaa

SEQ ID NO: 637 - DNA, 164 bp, Mus musculus
  misc_feature (1)...(164): n = A,T,C or G
gtgtcccttgcgatacatttgaaananantctttaacctataggacttttaatctttgttgggtccctngcccattaagggatttttcntgcactatcatntggggggtatttatnggtttgggatgaantcaattttttacattaaaattatccatttattat

SEQ ID NO: 638 - DNA, 456 bp, Mus musculus
  misc_feature (1)...(456): n = A,T,C or G
gactgaggggctgaagggctgnggctgagggctgccgagcttgnatcacctantnactgaaccctntggctgcggagacacnctngtgatttgctccacatcncgtgtgcttncctcaggatnacaaantcttcnnggatggagatatgcaacgangctngagcttacagnccatgctcactcaagggtccgagatncttggaaaagnccncggtgccagagttcacctgtcaggngggngggntgncgccanggttttgcctccttagcggactaccancaccactaccanatgangcaaagangcacntgctntttctnnagctgtgnnttcctctctgggcatttgctgggtgtgacttcctggaatgacagaactctttgttttagatcctggcccagaggcaanacatggtaaaggggggggaggggccctcaggggaaaactgcccaaaa

SEQ ID NO: 639 - DNA, 470 bp, Mus musculus
  misc_feature (1)...(470): n = A,T,C or G
tgaggtggctaacaacaagttgggaagttctccatcatagttagcttcatatgtcaacttgacacaaacctagagcctactgggaagaagaaatgccaactgaagaattgttccattggactagccgagcagtgtgtctgtgaggcattttctttattgctaattgatggtaggatggcacgggtcaactgtgggcagtgcaaatcctaggcagatggatcgaccctgtatgagaaagctaactaaacgtgagtctggaagaaagctgccagtgaattgcattcttccccgagtcctctgtttcagttcttgcccccagcttctttgcctttatctccctggccctgccttcccttcacgatgggaccanttaccaggangtgtaaaacggacagaaaagtcttttcttttcccaaaattggcctttaanncatgggatttatccatagcaaccagcaattagaagagct

SEQ ID NO: 640 - DNA, 129 bp, Mus musculus
  misc_feature (1)...(129): n = A,T,C or G
ttgttcttggcttgagggccctgnttttgatttggaaaccccanctntggnaagaaagaacccnttgggganttgacctccnnccccaaaataggtngtggnngccctaacgggggggggggcgggcct

SEQ ID NO: 641 - DNA, 151 bp, Mus musculus
  misc_feature (1)...(151): n = A,T,C or G
taaaccctttgttgagtaagangccttgggcatgggggccagtcncngtnanagaaagatgactagggcacaaanaacctgngagtannatgggntnggggnacccacctggcttttgnatagaaggagnnggggattaatcctctttaaa

SEQ ID NO: 642 - DNA, 403 bp, Mus musculus
ggtcatctggcttggtgacggctggcctcgtctgctgaaccctcttcgcttcagagtcttattctcaagtattctcccacggaagactataaaggctttagaacccagaatgagagaagtggggcatggtgacattggattccagcactcgagagattgaggcaggaggattaagaagagttcctgctagcctgcaatacatggagtatgtctcaaaagtgggtaatttaggactggagagatggctcagcagttaagagcactgactgctcttccagagatcctgagttcaattcccagcaaccacatggcggctcacaaccatctgtaatgggatttgacgccctcatctggtgtgtctgaagacagctacagtgtactcatgcaaataaaataaataaaa

SEQ ID NO: 643 - DNA, 513 bp, Mus musculus
  misc_feature (1)...(513): n = A,T,C or G
actgagacagtcttgctatacggcccagtattgacctcagacttgangcaatactcctgtgtctacttcccaagtggtggnatcaaggacggntgntaccacacctggcaagatatttnttanaagaggcanaagctctcacaggatanacagttgaaagacaggcanccccannggctgggcctactaacaaggctgaaaacagggtatgggctgtggtacaaacggggaagcangcctgaggctgggcctgtctagcattgggacctgngctgtcacttggggaacataaaaaccagagtanccctcaaactcaccacaaaaactaagccacgtgcctgtggttggatcctcagctacgccactaacctcattggactgtctcagaattggatcactcacaggagttggaggccacagtagacactctgaggaaaccctagtctggagtccagcccaacagagaccaagccaaggcctctagcagacagccttgagggtttatgcactttg

SEQ ID NO: 644 - DNA, 302 bp, Mus musculus
  misc_feature (1)...(302): n = A,T,C or G
ccagtctccttcagaaccatncgggganaggaacagcttgttcnnaacgctcctgncanccncnctcagaggntgattgacncccctcgaagngngcctgttgggagattggtttactttgggtgtgnnngggnctccggagccccactgggggctttttctttgttcaggaggtcctacagagtcaacgtaaagncccgctctccttggtgggatnctcagaccttactgaagggaacccggaatgccncccctgagactgttttgctgatttgggngnccctgnaaagagaatactcctg

SEQ ID NO: 645 - DNA, 468 bp, Mus musculus
  misc_feature (1)...(468): n = A,T,C or G
gaactgagcactactntggattagtacccagggctnctcacctgcccagcangcagtctgncactganctgnnctcccagctgtatgagagactttngctgncatnactaaatntcngccgagaatccacttaagggccttnggntcacannctganggttcagaccatcatggnagcaanagcgcacagcgtcaggaatgggaggnagccatcttcccaggccctcaagcttaatccttagnnncctcatctgcttcctgnctatctcctcttcccatagccacgatngggccaatcgcactcttcatcctaaacatggggttnggaacagtngctgactcctgggggaagttgagaacagcaatggaatgggggcatacaagatgctcacactgggncattttcccctctccttgnccttttctgncacctgccacccctggagccaaatcagcatgctcctcgtt

SEQ ID NO: 646 - DNA, 493 bp, Mus musculus
  misc_feature (1)...(493): n = A,T,C or G
gactgaggtggggtctttcagggaggangaggactgactcatggnaagccgcagagtaacagaacataacaagatacctgagcncacagnctgcacccttnngatcgngagaccatctgtcanctnccaccgttcctctggccacagaagcccacgcgagcccgnatgaagtaatggcttctaccctgacgcatcaacaacncatggatctcanagccaaaagaagccnncaaaaatacganttnggagagngagactgcctaatgagaacanacaaagaanggcngatanacgaggcacttggctatcangacattanacttaacacaactgggaagaaggccaggttttagctttcanaatacggggcagcatgcctncaatctcagaactgtgatggtaaaagacaggatgatgaagtgttcgggtccaacctgagctacatgggaagggctatntnatactactcctagntgtgccatgcaaaagctct

SEQ ID NO: 647 - DNA, 327 bp, Mus musculus
  misc_feature (1)...(327): n = A,T,C or G
atcaaggaccagcgacccactnaggacctaaacatggccttaggtgggtgaccgtgccngccacgttcggatacccgcacagccctgcancaangntgggaggacatnanccgcacagactgcctatatgcactgtgggtctcangctncattgcagcccanggcaggagnatgggaccacagataccaacgtggggatcacagaccaccatggagganggcctcctntctggcctctgacngntgantananccatggggaaacctgtgaaaactccaggnttgntgcacacccttacancaantttattgggcaacaacatgctg

SEQ ID NO: 648 - DNA, 286 bp, Mus musculus
  misc_feature (1)...(286): n = A,T,C or G
gactgagctgcccgggcctgccctatgctaccggagcacactcagactgggcagtcaagagttgcacagagacacttcctggggtcagacttgacacagaanagaaagaaagaactccttggaaatgagggtgttggaagcaggcttctgagagatgactaggagttttcaaggaggaaagggtctgaaatctggcctttcagaccaganaagagaaagcttgtgagttccacacaaggtngtacccatttaaaaattaaattaaactanttacattttgacacaa

SEQ ID NO: 649 - DNA, 115 bp, Mus musculus
  misc_feature (1)...(115): n = A,T,C or G
cctggggagtggacaccgngtnctgtcttctttgtgtccctgcgtggncttggcttcattcgcggcgacctgagacctttgacctgncctgcctttcccattgacgtaacgccgc

SEQ ID NO: 650 - DNA, 460 bp, Mus musculus
  misc_feature (1)...(460): n = A,T,C or G
acttgttgtggaactctcanaggtcctacaggaggnannnctgagcactggaatnacagctctgaaccaatgtgtccagctggagtcttanctgnnnaacatactggagcatgtgctggtggctccaaaaagagaaactggtggtacagagggcatcagagagtactgagagagctatgtccttcaatgattatgaaacagacatggaagctggcatagcagcacactcttgtgatccttgcacctaagagacagaatcaagagggccagaagtttaaggatgcagaagtctggagggtatagtctttgacatgaggtggcacagttcttcatgggagaagtcagaggaaaaggaatttaggtgaaaggagtattgtaggactgcanagatggctcatcggttaagagcactgactgctcttccgaaggtcctgagttcaagtccccagcaaccacatga

SEQ ID NO: 651 - DNA, 543 bp, Mus musculus
  misc_feature (1)...(543): n = A,T,C or G
actgaggtggcagggcagcttctgaggcctggacttgcccagttcttggaaacagggacttaggccttgtctcctganctgcngnnttgaagcctgncntggantnagnctagccttctcagcaacacagccaagaaagcacaccattcctctaagccttgacatttgtgacctccgagcaggtttccaagtaatctcagtcttccaagaaacagactccaacggaagaccaggaggaaggattgcagccccaaaggagataggagtttcacaggaagaccaacagaatctactagcctggtcccttggagctctcagagactgaaccaccaaccaaagaacacacatgggctggacctagacccccctgcacatatgtagcagatgtgcagcttggtcttcatngtgggtcctgaaccactggaatgggggctctcccaaaaactgttgcctatatgagtgatatgttcttctagttgggctgcctttgnctggcctcagtgggggcaggatggggcctggccttacgggagactttgaaag

SEQ ID NO: 652 - DNA, 350 bp, Mus musculus
  misc_feature (1)...(350): n = A,T,C or G
tgaggaatttaacaagaaaactgaagttttgattcaaatattttttgaattgaagccagaaatgtactaagattttgattctttcatttgattaagganggnaccaaacttgagagaagatgntctgtgagaacattactgccnncagcacatgtagacttcctaaggaaagctcatactgtnaaagnccccctggggcggnaaccatgcagancaaacacatcatttaggctctttttcttaggnggggctaatgagaggnnaaatcttcaaancctngnnnaggcctnncnctccttttcttganccngttccccccccctagccngangcttcaggtttagacacaa

SEQ ID NO: 653 - DNA, 377 bp, Mus musculus
  misc_feature (1)...(377): n = A,T,C or G
agactgaggtgcccaacactccttgnccccagtgagcnngcacntgtgcaagngtggnggnncacatgangnatacacatgccattttttannggagtgacttctacatatncatgggaancatctacgctgttccacgtcagcngagactttngncnttggatcctgcctgccctggatttcactatgaaccaccatgcccancttgtgcggntcctatatgattntcctaccgggngnntgtatgtncagacatccanagtgcacccgngtaganattaccccangcantggntctgactgaataacctgcatgatnacatcctgcattggacacagaacagtgcaggttncattaaaaacccattatatttgca

SEQ ID NO: 654 - DNA, 269 bp, Mus musculus
  misc_feature (1)...(269): n = A,T,C or G
caggactactgagctctccatcactatgaaanctagcatgnggggaggaagcttcgtggncaataccanctngattnctccatgtnctgtgaccngtgtatgnggcgacttcagcancnnggntttactancaagttntggntggtggccgagagcagtactnatancctttattggggggggntcagcaacagggttnntactagcaagnnctgnctgttggccnatagcaggagtaatagcctttattgnggggggggggggggctt

SEQ ID NO: 655 - DNA, 161 bp, Mus musculus
ccagagatcccctggaattgaagatacaggcagttatgagacatctgatgtggatgctgggcatcaaaccgaggtcctctgtaggagccatctctgaagtctctcagcttttgtagttttaagcacaatactattaaatatcttttgccataaaaaaaaaa

SEQ ID NO: 656 - DNA, 175 bp, Mus musculus
  misc_feature (1)...(175): n = A,T,C or G
tcaattgtttagcacctgaattgcagnttgcaactgtctgtaacgctagttccaaggcggatcccacaccctcttctggccttcaggagtattgcatgcatgctggcgtacagacaaatgcagcaaacacccatacatacaaaagtaatagacaaaatactcaaaaatatttttt

SEQ ID NO: 657 - DNA, 501 bp, Mus musculus
  misc_feature (1)...(501): n = A,T,C or G
actgagatgcagtgtgaccagcttcttcagctcctgtcaccagccaggacttccccaccctgatggactacacccttgaactgnccgncaaaatagatccttcctcctgncatattataagggcatcaaccctaccataaaggcagcttatttatacttgtcacatgaccaggggctagttacaacanacgaactgggactcagatatccccagntctctattgaagatagggaaggtgacattccagcaaggagaagttaggangggtgtttcagggacaggagctggattaaaagtgtggagaacatactgaactggaaattaaaagggattcttnggatgantggtcttccctttggngtntgggctgactcaccaaaatatgtactcttagagaaaactgactcaccttctctccaacacccgncagcctgccaatagctcctggnatacgagtaggacttcagtatgnncataaaattgggtgggcttggaaaagg

SEQ ID NO: 658 - DNA, 174 bp, Mus musculus
  misc_feature (1)...(174): n = A,T,C or G
tcaataaaccctggacgaatgagngagggcannacngaaggaaggaccnaaggaaagntgganggaatgnctaccctcgcctancngtggganggggacttcctntgatactgcagcactgtccctaccaggatatagngnttaaaccgtcagtaacccccaggacccagagta

SEQ ID NO: 659 - DNA, 362 bp, Mus musculus
  misc_feature (1)...(362): n = A,T,C or G
aaacccacgcagcaaanaagtcancagtggaaagnccatgcaatcgatcgtaattgaaccaaacaagccacattccagctccagcaagcagcatatcgaggcggcttttgacagaacatgttctgngacaaccaaggctncacagagangccctgtntcagaanagcaaancacaactcatcacatcaccaaaagcgntatggcagnttgggcgtnatggcngcacgcctttngtcccagcactttgggaaggcaaangcaggcgaatttctgagttngagggccagcctggnctacanagggagtttcagggacagcccagggctacacagagaaacccntgtctttgaaaaccccaaaaa

SEQ ID NO: 660 - DNA, 406 bp, Mus musculus
  misc_feature (1)...(406): n = A,T,C or G
gactgaggtcttgcctcagccaaacaccnagtgaagctgtatcacctgaaatatccngaaacttccacttcngacgttggagcctacttctctgggattccaatatacagaagaccaacggagacactcaggcttgtggactgagggactactggattcttggccattcacagctagccactgttggattagttggtctggaacctctacntcattccaatanattccatagatngatagatagatagatagatngatngatngatagacagacaggtagacagataagcggggagaaggagactccataagtctatgactctagagaagctgacagagagagagatttcataagttctgtgactctagacaacctgactaataaagaccttctaccagatgctat

SEQ ID NO: 661 - DNA, 305 bp, Mus musculus
  misc_feature (1)...(305): n = A,T,C or G
gcttactccccccagatttccaatagccgctctcctgtgtctgcttctggagtgccggttacaggagcacagggatcctaaggatccaactcaggctgtcattcttgccagcaaacacctttatcccccgaggttgctctgtgccggggacaggtttcctggactcagatggttctgcacgtcgaggctggntcctgtgcactccaggttcancatgagcacacacccnggcagcccccacactgagacaacgctttctttgtacccagactggcttttaaatatnctacggaaggccaaaaaaa

SEQ ID NO: 662 - DNA, 258 bp, Mus musculus
  misc_feature (1)...(258): n = A,T,C or G
gactgaggtcccttaggtctgatacaanctcacctgnntggtangatcntgaagcattncanagatgacataaaatgaggntccttcccggnctccanctnacactgcatanctacaacaatggactgattaattnggatggccngattcaagctgaagggcttnncnaangtgtaggangaacaatnttatcaagacccacaaagctcttatgggtcaagtcaccnaataaanagtacacatgggaagtactctata

SEQ ID NO: 663 - DNA, 213 bp, Mus musculus
  misc_feature (1)...(213): n = A,T,C or G
gactgaggtgggcagggcccccaacatggtcatagtgtttgactgctccatggngaccatggngcgcagagngctacgacgnggncaggggggagcacccgggcagatgattcanagccgngccatnccgnaanncgcctagagacgcacttacacccttatgntgagccctgtccntggacctttttaccagcanaaggaaccctttctggg

SEQ ID NO: 664 - DNA, 243 bp, Mus musculus
  misc_feature (1)...(243): n = A,T,C or G
ttgttgaagaaacttcctggctgctttcctgtctttctatatcattcatgtacaaagtaaacatccatcactcaaacttggagatgtaagaagactgaaatagatatgaagtggtagtgacttagaagtaattctatatcttaactgctctcacatttttttgtttattttttgngatagaatctcatgtagccgagactggnctaaaacccactaccccccccccaaccaacaggtttggaa

SEQ ID NO: 665 - DNA, 530 bp, Mus musculus
  misc_feature (1)...(530): n = A,T,C or G
gactgagggtctctgtgtaaccctggctgtcctggaactcactctgcaatctaggctacctcgaatacagagatctgcttgcttctgccttacaagtgctgggataaaaggcatgtgccactacatagagccgaaaaattttaagcaaactacaagcacacattctatcagcagggaaactgtcaccctcaagtgccatccaggtctctgcagaactcccggcctgatgagcagctggtgccggcaaggttagtgtggttttgaacgttactctgacctcacagaagggagtggaaatgagcagtccacgcacaggaagtcagcgggaaagagaaggccgtctgaaatggtcctttcacacagtgagctgccatgactcatcagttctacagcgagtcangatcccatcagaaataagctacttgtgcttntacattttattcaaagaacactnnatctggcaaaggcttgcccagtcttataataaaccaaaatccatctggggattncnnaagccttagcgggccacc

SEQ ID NO: 666 - DNA, 229 bp, Mus musculus
  misc_feature (1)...(229): n = A,T,C or G
actgaggagctggcttcccaatggggtgcanttagtaggccaggcccaccaggcagctgcagttctgcttctgctagatcctgccctggggtgaggcaggccaagtcatgaagccagtgccttcctcccagcgggtcctgngaagccagtgatagggggtggctgaggcancagacctcacgctgatgaggaggctgcntgggttccnggactctggccgaaagaggag

SEQ ID NO: 667 - DNA, 400 bp, Mus musculus
  misc_feature (1)...(400): n = A,T,C or G
ctgtctccagattgactcgagcagagggaaaagacatcagcctctcctgtgtcattcttcaaacatttaggggaaattgattttccacatgggctgtggctaagagacggatgcgctggcccagagttcccgagacgggctgttaccacaagcacttgctacgaccagactgagcccaacttgaggaancaganacagngctacngaagctngctgnncacaactggtnntcnnctnctgtggngctggngantgaagccanntgtcccatgcatntgccaccctctgcgctaaccctaggaaaaatgacttctnctggcatcngntagaacactaatgcagacagacagactgacngacagatacacntgaagggcccaggtagcttcaattatgatca

SEQ ID NO: 668 - DNA, 106 bp, Mus musculus
  misc_feature (1)...(106): n = A,T,C or G
acctatggaccttcggtcccttcngatncngtattctttcaactaaaagncatatcggaagaanaggattgnntttntttctttaactttccaagaaaccgccact

SEQ ID NO: 669 - DNA, 106 bp, Mus musculus
  misc_feature (1)...(106): n = A,T,C or G
gagcgatcagaagaggaattcctagctgtctttgtctgggttataaagtcctgttgngattggacgggaagtaaaaccatcatttatttttcttcaaaaaaaaaaa

SEQ ID NO: 670 - DNA, 242 bp, Mus musculus
  misc_feature (1)...(242): n = A,T,C or G
agtgtcatgagagtgngagaactgncctgtctttcaccagcctcancacttgnaagagcgggtcctacnnctgaccgaggcataaaggttatgaacttggtcctcgngcacccngnttnatgntgancntncnctgagggcatgaanagcaggagagttgaccacctctcangccgttttagggctctgaatnggcccatcccaccatctaacccatcantaaactgctgtagtgcatgaaa

SEQ ID NO: 671 - DNA, 235 bp, Mus musculus
actgaggtttgatcagacacatttctggggtcaccgagttcatatctgcttgtggattatctatcggaatatgtcattccgcagagaagggagcagctaaagggagcctgccctgccgtgttctgcctgtgtgtgctctgagacatcccaggggtatttatgagcggggtgatcttaagcgatactcgcttaaaatccaagaacggcagcagaaataaattaactggagaatcta

SEQ ID NO: 672 - DNA, 275 bp, Mus musculus
  misc_feature (1)...(275): n = A,T,C or G
cagaattaccttgttcaaagcatcncttctgagcttcacaagctttannncgangcngnggaccaggtcttcanggcntgtgggtncggcctcagccnccataagatgtgaaggctactcaagtgggncnagaagtcatgatggaaacactncttagtcagtgggctctgggacactgcacgaagtcccatgaactcagaaagtgccctgggccttccactcttcagtcttctgggaagaagtcatctctactggcattacagactcctagagaa

SEQ ID NO: 673 - DNA, 156 bp, Mus musculus
  misc_feature (1)...(156): n = A,T,C or G
actgaggggaacatctcttcggtncccgagncgaggaacttgnangncgaagaccaaacagcgacttcagatnttcganccttanttntgcttgtgaatacggccanatttgaggggaaataaactgngcgnagtttatggccgataaaaaaaaaa

SEQ ID NO: 674 - DNA, 253 bp, Mus musculus
gactgagagactcttgctgtgcaggcctggctggcctagaactcttaaacctcccagtcatggagatcccccagcctctgtttcccgagtgctgccaaactggttcttagaaggagcaaggaaaatcagaaaggtggcacatgcttgaaattctagtcctcggatggcagaagcaggggaatcgcttgaatccaggagttcccggccaacctggacaacatagactcgggtctccaaaacaagataaaaaaaa

SEQ ID NO: 675 - DNA, 329 bp, Mus musculus
  misc_feature (1)...(329): n = A,T,C or G
cccaatgccaagcggctcacagctgtctttagctccagctccatgggaattgangccctcttctggccttctgtggtactgcncacacattacagacacannacacaaaagtaaatatngaatnctannaangtattaaggacataanaatanacctaaccanggaagtanncagatctcagtanagaacatttcaagacactaaaaaggagaatnngnagntgctanaggatgagaagaaagaattggtaaggctgngcctggagagatggttcagcgnnntaacnagcactgactgctcttncggangtcctgagttaaaatcccag

SEQ ID NO: 676 - DNA, 258 bp, Mus musculus
  misc_feature (1)...(258): n = A,T,C or G
actgaggagagggcgtgagcctgactctcancaattgggncncaggnacagctttggctggtnangaggnccaggaantgatcatgganccaaccatccagaggaaagacnctgaagcccaaagngggnatacgatctgccanaggccacacagctcactagtggcaggtagcttggactcccaggntatggccagaagtcaacgtagctgctcccagcaaaagcagaacctgagnagctgncggatgaagacaacgt

SEQ ID NO: 677 - DNA, 108 bp, Mus musculus
  misc_feature (1)...(108): n = A,T,C or G
actgaggtggggtctttnaggcccganctctgnaaggaacacangcagcctggcncctctcnatccttcatcccgggcgccaanttaccactgatccatggtgaggca

SEQ ID NO: 678 - DNA, 355 bp, Mus musculus
  misc_feature (1)...(355): n = A,T,C or G
gactgaggtggacgaacacttacctccctgcacgaagcccccactcagtccccaacactgaaagaanctatgtgtggnggttcacgcccataatcttgcactgcgaaagganaggcaagaggacaacaangttcaaagtcatcctcagctacgcaattcaaggacaggctggagagatggctcagtggttaagagcactgactgctcttccgaaggtcctgagttcaaatcccagcaagcacatggtggctcacaaccatccataatgaggtctgactccctcttctggagtgtctgaagacagctncagtgtacttggatataataataaataaancttttaaaaaaataaaga

SEQ ID NO: 679 - DNA, 511 bp, Mus musculus
  misc_feature (1)...(511): n = A,T,C or G
ggctgcagctcactggctggggcgtgaacagnnngnntgagccggnagcngngcctatactctgctctnnttcngngcnccaatcttttncagnnnacccnagcatntcancattcttctccatggnccagttacctnagnngcacaagactctcaaggagnttcaggctttttcagtgtgctttatgcagttgagagnaacatgggggcngctgngtgacttagcantganagcnactactnnnagactttgaaaanngttatcactttgcnctggaccctngnaagaaggttctgcggttttcttctggcactgggtgtctcccaggaccttgagcactcaacaagtactttaccactcagctggcagtacccaaaacaaccactacaaacagaaaggctgaaaaacacaactggggagatctttcagcaggcacaagtgttcgacagagngnttnatcataacccaccacggnccacttgttcccatgaataaacactctacacttat

SEQ ID NO: 680 - DNA, 280 bp, Mus musculus
  misc_feature (1)...(280): n = A,T,C or G
gactgagagtgaagctttcatgtnagtgtgcaatggcacacnggggagcggactgtcccatncctgngcttcntcacaactgtanncctgaagnctttctacgaccacagataggcttctctcatcctgtgtccagtctgagatctncaactattgctgtccagaatctactctcagngcatncttntggaccagnctacagacggcattgccagcactacacacttgttcctgattcctttgtatgtcccagttgctgacatgtctcattcccacacag

SEQ ID NO: 681 - DNA, 254 bp, Mus musculus
  misc_feature (1)...(254): n = A,T,C or G
acatcatatggtctctaaccatgtacaaacaagactcctggatgttggnttctgcactgtcattagcctgctgacaggcaaagccaaaaggatgatgttctggagaaggcagtactcaaagtgcctgctacagtaagtgggggccatcaataaatactttgtataaaaacaagcactaaggcccatttggacatgcaaactttatntggcnccattacaggggaacgccagggccaaaaagtgggagtgggtgg

SEQ ID NO: 682 - DNA, 127 bp, Mus musculus
  misc_feature (1)...(127): n = A,T,C or G
gactgaggaggcttcctgtctcctgggacannccnactctaggcagtctagagctggactcctnggntnntattagtcatggaaactgnganacactntatattctgctaacattcaaataaagata

SEQ ID NO: 683 - DNA, 140 bp, Mus musculus
  misc_feature (1)...(140): n = A,T,C or G
ttatgggggctggaaagatnncttgaaggnttaagaacccntggctgctcctctgaaaagaccccaggttcaatttcccaaanccaacatgnnngcntnacatcttttttgnaanttcccgttnccaggggaaccccggc

SEQ ID NO: 684 - DNA, 224 bp, Mus musculus
  misc_feature (1)...(224): n = A,T,C or G
gactgagtgcctgattgaagcaaactaagactgaagaagattgattccggctcacagtctgaggaaccagtccatcaaagcaggaaggagaggacctnttcnnagcantgncttgntgcttatacttaagaantgcaggaaantgatctgacaganacagctnactgtcaagaagacanttgntgctgngactgcncaacctganttctgtctctggcacaccc

SEQ ID NO: 685 - DNA, 310 bp, Mus musculus
  misc_feature (1)...(310): n = A,T,C or G
gagccacacactgtagcacctttctactggaccananattattcngnggtaatccgggtcccctcccccttccttcataactggngncacaacaatnnaantggagccttgatcagaaagtactnnagantcctnactgnannccagagttcanttnntagaanaacctacagttggtggctaacaanggcctgtnactccagctgcagagaatntaacaccctcatgtgncctctgtcgtcactgaactcnagcacatctacatccatacacattaatagatgtaaaanggaacaggaacatggaaaaa

SEQ ID NO: 686 - DNA, 226 bp, Mus musculus
  misc_feature (1)...(226): n = A,T,C or G
agcgattgttcagaagnannagtcagattttgttacggatggttgcgagccaccatgtggntgctgggatttgaactccggaccttgggaagagcagncgggngctcttacccantgagncatctcaccagcccacctcttgtgatcttgactagaagtaccttcctaacccagctcttccactgtttttaaataaataaacaaacaaataactcactgaccttaa

SEQ ID NO: 687 - DNA, 398 bp, Mus musculus
  misc_feature (1)...(398): n = A,T,C or G
gactgagacaggatttctttgtggagccctgcctgtcctggaactcactatgcagaccaggctattntggaactcanacattcgcctacttctgtctcctgagagctgaagttaaaggcatgaacccccacacctggcttatcatctgtcttctcancaagagacttcccacagagaagggattccattcctggnttcacgaagagatgctgagatctatgtacccttggagttgtacaaaaagttacagggagcacatttcagtagagaggctgaagactctcatccagcccggaaatgagtgtccccctaaaaccctagtctggggctgaggtagaaagattgagagttggagactggactgggttacataacaagaaccaatctaaaaaaaaaaa

SEQ ID NO: 688 - DNA, 154 bp, Mus musculus
  misc_feature (1)...(154): n = A,T,C or G
taccatgacaccccactgaggaccatgggcactggngcgtggagcaataacacctggngttcttctccatgctaatgaggccctganctttcanccaatganctgntctttctgggtaatncttcccacanatgatatttaattccttgactaa

SEQ ID NO: 689 - DNA, 350 bp, Mus musculus
  misc_feature (1)...(350): n = A,T,C or G
aatctgggatcctaacagannngctgctcctgggaaggtcngnctggnnaccccccgnctganggcttcctgtgtgattagaaacctagtttctccacaggtctctcttaatctacattatttcacttttctatttcctctttacatatgtttctgcttccagacttttcatagctttctaaggaaggatgatttcctatttgatatagctgatggtactatgcaaaaaccagatccttgaaaaggtcagagtctgtatgcatagtatgcatagagacttatcctgtgtatgaatgttttgtgttgcaaaaacatactgaataaagaaaattacccctcaaaaaaaaaaa

SEQ ID NO: 690 - DNA, 315 bp, Mus musculus
ttcccctgcgcccagccccatcccaacctgttacaacttgggctgtgcatggtgtttcttggaaactggaacacagactcctccgactgctctccaggccctttgtcctcaatgagcagaagaccacagaagctggctactgaagaggctgtccagatagcagagcacctcactggccttgcttagcacctttgctacagagcaagctctgagtgctcaccacctgcagggactacagcgagatttgtcaggcccccacttcactaagggccactctctagtgagccctctggagaaggctccactaaaaaaaac

SEQ ID NO: 691 - DNA, 409 bp, Mus musculus
  misc_feature (1)...(409): n = A,T,C or G
gactgaggctgccagcagaggtatggtccagatttaaggtggatcgctgaatctcagaagatcttgatttagatgtagaactctcagctccttctccagcactatctctgcctgtgtaccaccatgcttccctccatgatgataatggactaaacttctgaactataagccagccccagngaaatggtgtcctttatgagttgccaaggtcatgatgtctcttcacaacaatagaaccctaacacagaatgnnaatgaataggacatgctgggtntaanctcacagncccaagggctagtattacaggcgggtgccaccatgcctagctgtcagaagtttacgaagctgaagaaggccacactcaggtgtctgaagagngctgagaataaagatgtacaccacctgaag

SEQ ID NO: 692 - DNA, 352 bp, Mus musculus
gctctcctgtggaccgccttctgtacctgcattacagaactttggaacaagggaagaaccatgacttaatgagagagaagccactggtgggtcacgttttctccattacctaggaggctcaagttatggtggcaggaaacaaggctccactgtattaaccaccgaaactccaagatcggggctggtgagatggctcagtgggtaagagcacccgactgctcttccgaaggtccggagttcaaatcccagcaaccacatggtggctcacaaccatctgtaacaagatctgacgccctcttctggtgtgtctgaagacagctacagtgtacttacatataataaataaataaat

SEQ ID NO: 693 - DNA, 374 bp, Mus musculus
  misc_feature (1)...(374): n = A,T,C or G
ccatctcaaaaatgctggggctagagacatgagccacttcatcagcttatgatgctccaggagaatcaaacccaggacctcaccaaggctaggccttaacaatcttntncntttncaaggaggatcattagaccttgtgtccaaagggagactaaccacanttactcacgncctttgtcctggatttccatgtgaataaaattccctgttgntactccnaaagaaanaaggngaggggtnncntncangaccnanccanaggaccggcaggactgctgctngatagnanctctgtcannaacnattagaaggcngggntcnngcatgggaccacatgntggaacacggaagcgaatttgcttatatcttgaact

SEQ ID NO: 694 - DNA, 106 bp, Mus musculus
  misc_feature (1)...(106): n = A,T,C or G
tgattttatgacccgaagcttgtganataaagccctactttctnntttttgtttttttgntcctacnccggctggantntgaccttcaaaaactgtggcctacaca

SEQ ID NO: 695 - DNA, 304 bp, Mus musculus
  misc_feature (1)...(304): n = A,T,C or G
gaactgagaggaagatcataaaggctgtcctgtggagtgagcctacaaatgaggtgctgtggcctttgaaatcagggtgatctgggaagagggaacttcaattgaggaaatgcccccatcagagaggcctgtgtgcataccaatggggcagtttcttaataattgacatgggagagtccaataaccggggatggtaccacccctgggtaagtacacctgatttgaacctttttctccctaaatngctttggttgtgttatttatttatttatttatttatttatttattattatttaataataa

SEQ ID NO: 696 - DNA, 185 bp, Mus musculus
  misc_feature (1)...(185): n = A,T,C or G
tgagcttctcccgtgctacggtttcatccccagccagatgacacagaaagcaacacgcatggttacggaggaagcagaggatgaagttagcctcagtctggtgtacgagtgagaggtgagaggtgagagtggccatctctgattacagaaataaactcagccntgggagtccttaaaaaaaaaaa

SEQ ID NO: 697 - DNA, 271 bp, Mus musculus
  misc_feature (1)...(271): n = A,T,C or G
gattgacagccatggntacatccttacttgccctaannncanccaggatgaantatcgccangtgnnacactctgaccacactcacagnntttagtgnggctnccagnagncgaanatggaagagcagcaggntttatttaaaccactgggcaatatcttnntcatncgtttttaaaaagatttattagggcttggnganatggctcantagggtaagagcncctgactgctcttccaaaggnccggagttcaaatcccacaaccacatgg

SEQ ID NO: 698 - DNA, 210 bp, Mus musculus
  misc_feature (1)...(210): n = A,T,C or G
gactgaggtcgattaactgacttgcaacactcgtgtttgaggatctctgtttgtgtttaccagtgtnccttccccgcgctntaagngacaagaactgactaaacaaggacggacagaaacggaactcctaacagatgtttcaataantgccgctaagacncanaatgcttagctgagctgaacttcgnccaggtggctttaaaaaactaa

SEQ ID NO: 699 - DNA, 111 bp, Mus musculus
gactgagtggtttcttccttgtgacagcaaggatgggtaacactgcatcaagtcctactcccagcatgaagtctcaagatctggagacatcaatttacaaattaaaaaaaa

SEQ ID NO: 700 - DNA, 248 bp, Mus musculus
  misc_feature (1)...(248): n = A,T,C or G
cacagtatttgaggcatccttgcattgatttgngaacaagctgngtccacctanacttgtccatngcactgngatgagagagagttttgcttttgttaaggcangctggtaccctcaccnagagaatgactgancgtcatgcattgtgtcctttcttncctcccaacagcanctttatgaagcgtacttacagatggggntactgaggcagtttgcccagtgccacactnaggattaaagagctgttg

SEQ ID NO: 701 - DNA, 428 bp, Mus musculus
  misc_feature (1)...(428): n = A,T,C or G
aaggtggacactcacatctatacccacgggtnntagnagagggggttgaatcctngaanagccagaggaccggnaggactgtngtangatagtatatcttgtcangaactatcagnagnatggttacctgcatgtgaccacatgtggagcaggaagctaattgcttatatcttgaactgnnngcatgaagcagagtgagagagaaanaaaactggaaaaggacgtgagttttaaagccttgtctccagatgacacacttcctncaacaagaccacttnaccaaaacctccccaanctgnaccacncaactggtcaccaaanatttcaaatatntgancncncaggggncattntnatattaanccaccncattntntncnaanggggancttancacccccgtatacacanacaaccttacagcataa

SEQ ID NO: 702 - DNA, 364 bp, Mus musculus
  misc_feature (1)...(364): n = A,T,C or G
ccagccacggacaccaacncggcttcaggnggcagcacagcccgcanacaacancatggcttnnggcnnggtnataancacgggnntncangntgcanncngcattgaagccttctaggatgtttagncnancantgacatnacctctctctcncttgggtntnggaatgattatcccaaanagatgcccgcaacaactcctatcaggttacatcttcaccgggcacctgagacaggctcactgagggaaggcttgggccactaagtctaatacataatttgtgttgaattgctggcgccatcataatagaaggagagaactgtcagaaattcgntcttttatctactctatttttctaaataa

SEQ ID NO: 703 - DNA, 109 bp, Mus musculus
  misc_feature (1)...(109): n = A,T,C or G
ggattccaccttcccgngtnangatcattgacnagaggnnnttctgacctttaatantgnaaaagctcattggtaataaatatacgtctgatacattgaaaaaaagaaa

SEQ ID NO: 704 - DNA, 408 bp, Mus musculus
  misc_feature (1)...(408): n = A,T,C or G
tgtttctcgatgcaggagcgnatnncntngtgaactanaaanactnanctacnccnncgctngctggtacacggaagtgnttaangggntgggtanggnctanaantgnnctgccacagagccagaattaggnctnacncnnagtacagtaacacccacancnactnctgatccttgtgattattggaanctatntaccgaagtnaaacgcaanaacctgnacagngaggaaacaatttctcctaagaatgggccaacatccccatacctgttcttctaggtttcctagagacacgtcatccccaatgccagccggaagcggttaaagagcacgatgaccctattcctgctctaccatcgcttctttctaactttttcttttttaaattaaaccaaaaagggggaatg

SEQ ID NO: 705 - DNA, 525 bp, Mus musculus
  misc_feature (1)...(525): n = A,T,C or G
ggcccccagagagtcttcgcctcaccaaancaatgcnctgcaatactcnaaagtcaagaccagatctcttggcngcctgtcttctctactatntctgctgacatcagggtctaanatggaagaaanggctgtccctccaaangggtattgcaaaacttgaagagactgatataatctgtcnagctgctgagantaantgactggcccctatgctaagcatgtcatgatcantagngccttaaaccatgctgaaacttggtttaattccgaagacctgngatggagtccagaactctgcattttagatgtgcggtagcaatgataaagagacagaggctcacatcctataccctgctctactttgtanggngtggcatcctggaccagttgtatnaataggctcatttttgaaggagatgattnttctatctaaaggcaaagaagtggatcaacctttgagaagctttccagatntttangaggctaaggagggggcttcaagattacaaaagacaacttctttgg

SEQ ID NO: 706 - DNA, 267 bp, Mus musculus
  misc_feature (1)...(267): n = A,T,C or G
ccgcagtttgatacccagcaccacatggnggctcacaaccatctgtaatgagannggaagccctcttcnggagngtctgangacagcnacagtntacttacatataatanntaaataaaatcttaaaagaggaangataatgncnaactantgctaacactgnggcnccaanccatcaagaagcctggcatggcanggggatgggcttcccccctttataagcacagactgctagtaaacattgagccttgaacaggaaaaaaaaaa

SEQ ID NO: 707 - DNA, 235 bp, Mus musculus
cataagcaactgtaaaatgccttaatccattacatctgaatgggctgtttaaatcagtatgtatagtgtatgttcacctatatgcttataggtgtgtaaaatgtatgcaaggacattcaagaaatagtgatggttgctatggagatggggagatgaggctgggggtgcctttccagtgaatatttgtgtattgctacaatcttttaaaacttctgaatggtggtaaaaaaaaaaa

SEQ ID NO: 708 - DNA, 238 bp, Mus musculus
  misc_feature (1)...(238): n = A,T,C or G
gactgaggttcctgcttgagnttctgccctgncttcaagttggttttggtcagtgtcaacaaacgagaccatctgggataccaggtttcgctgtgtnnctcangntagcctcaaactgtgcatctttggttagctgtggattcataatccttctgactctgccttcagagtgtgctggactcangtnggcnnttggcangngatgtcttaaaatgtgnacaaaaggaatatatcacct

SEQ ID NO: 709 - DNA, 364 bp, Mus musculus
  misc_feature (1)...(364): n = A,T,C or G
gactgaggctgtggcttanagaatgagtatgcanactggatcagagactgaagacttatgggagcttacttggcttgagctcaccagtggcactgcctctcattttctttgaccttgtctcactgacaagacaggcataaggcctccaaagagaaggtcagggctggagagatggctcanacgttaagagcactgattcttttccagaggtcctggattccattcccagcactcacatggcaagctcacaactgtctataactccagttctaggggttctaataccctaacacagacatgcgagcagtaaaaaacaccaacgtaataaaataaaagtaaattattagaaatttaaaaaaaaaaa

SEQ ID NO: 710 - DNA, 143 bp, Mus musculus
  misc_feature (1)...(143): n = A,T,C or G
actttcttactctccnananccatatatacgccctggttnantctnaataaaaagnacgagnacnanccnaccctanntaaaggtatggatccgaggtcaaacctaccctaaaaaaaggtntgtttacaagtcaaaaaaaaaa

SEQ ID NO: 711 - DNA, 330 bp, Mus musculus
  misc_feature (1)...(330): n = A,T,C or G
cctgccgaagatgagnctaggacctggcttcctgatggtnctgcatgttactcagatngtacagtnngcnanattacagcngctttctgacacaactctcaaanatactggggaggngacntctccncaanggccnnaacttcaagcantacacatgntattacagtttgtttggaagannatngggccngatgtttgattgttcactgacttatanactgncagnccacagattggctgnattggtcagggccttgaaaagatcacgantgtganattagcgaganagacatcccgggganaaaagtattntagaaaagatttctccga

SEQ ID NO: 712 - DNA, 214 bp, Mus musculus
agactgagtaaaggataacataaagtcacatcttggggctggagcagtggcgcctgctgctcttccagaagaggttggttcccagctgccacatcagttatgccacaaccacctgtaactccagctccggtggatctgaagcactctgctagcacatacatatgcagataaataaataataaaagtcatatcttgtttgttttaaaaaaaaaaa

SEQ ID NO: 713 - DNA, 161 bp, Mus musculus
  misc_feature (1)...(161): n = A,T,C or G
agactgaggttctcacctgtcctgggacatgcttnatacatagactggtttgtccttgaatgnccttgaactcagagaaccacctgtctgtctctgcctcctacgtactaagattaaaggtctgcaccaccagccggtctgaagtgacagacaaaaaaaaa

SEQ ID NO: 714 - DNA, 346 bp, Mus musculus
  misc_feature (1)...(346): n = A,T,C or G
atactggggaggcataccagatgaaagcggggaagcagaggacganttccagacgctggcnnggacagagcatngagggaccaggcgccctcccggcnccctgtacagatcctggnacnaancgctatngaatgccagtagcgtgaatccacanattgactcattcgtttcnntcatttgtgtgctcgtttgactagatgaacaacaccgggcacacgccccctgcaggggnggnaagggatatattaacnattattcccnttgacagatgaggacgttgatgagacactccctgtgtgntaagttgctgggcccagnggtcaagtgagagcctgtggaaggtgta

SEQ ID NO: 715 - DNA, 100 bp, Mus musculus
  misc_feature (1)...(100): n = A,T,C or G
acggatgctaacactgaacttattttttnaattgtgcttttcaaaaatatatagggtcacttttaagtaaaaaanaggaacnagggcttggccccccccc

SEQ ID NO: 716 - DNA, 152 bp, Mus musculus
ttcttcctggcacctgcatggtggatcacaatcatctggagttccaccttcaggggatccgacaccacgtctggccgctgaggccccccagacacacatgcggtgcacagacatactcacaggcaaatactcatgtatctaaaaaataaaaa

SEQ ID NO: 717 - DNA, 221 bp, Mus musculus
  misc_feature (1)...(221): n = A,T,C or G
ttgagagacaaatgcaccnaattcttctcgtggctattccanctagtnctggccagttctgctgacttgtgctcatttgggggagccttcgggatttctgctggatgggncctctgctactggttcatgttnggcgtgttgctattganctggactgntggnatcttgacaatgaagagtggaattgcccccaagaattaaacaggtccatgatcccctta

SEQ ID NO: 718 - DNA, 528 bp, Mus musculus
  misc_feature (1)...(528): n = A,T,C or G
gactgagagctgtcatttacaagccgatgtctnatatccggntctgggtcctctggcgctgctcggngtacgtgtcatttagtgaccaagtgagcacagcagagagaatgaacaagagccagtgactaggctaacaagccaagtaaatcctggccaccggagagtgacagatgtcctggccagatcgctcctacagcaatgaccctggggacagtacacacctctccacaccacggttcccttctgcatacaaaaggaataccacacaccagggggttcctctccatttcagaggatctcttcacctgatagttcagagccatccagggcccaaggctaaagcttccacttctaaccctgaggcactgctctaaaacagatgtgtgaggtgagctctttccttctcccctcccccttcctccccttgtcttttccttgtcttgcagagacagggactgaacccaggacttcatgcatgcaagggaactcttaacactgagacatatctctaactcaaattaaagtact

SEQ ID NO: 719 - DNA, 448 bp, Mus musculus
  misc_feature (1)...(448): n = A,T,C or G
gaactgagggacagggaaactggananagagctcagagggggagctcacctgccacataagtgtgagaccctgtgtcgtcaagatcatgaacgccaaaatgaagaacancanaggactcagctnattggggaagcagagagcagcttctttattcttagccacttaatattgtcacagctctgatcacaaagtacacagtgtgtaagataccaacctgctgcctgccctccctccctcccttccttccttctctttctctccctnccttcctctctcccttccccctgctcctcctcctctgtttgtttttcgaggcagggnttctctgtgtagcctggctgtcctggaacttattctgtagaccaggctggcctcgaactcagagatctgcctgtctctgcctccaagtgctgggattaaaggcatgcggtactttaaaaaaaaaaa

SEQ ID NO: 720 - DNA, 152 bp, Mus musculus
  misc_feature (1)...(152): n = A,T,C or G
ggccctgccggagtgggtgcgtcangtgcgggtttgggctataagaccntcntcngagctgtctggaagacagttttccactagcggccttcaganctctnacctcntnctgcgccatgcctgcctggatgctgccatgctcccaccttaat

SEQ ID NO: 721 - DNA, 268 bp, Mus musculus
  misc_feature (1)...(268): n = A,T,C or G
ggaggctggcggcgagtttgaggcaagtctgaccaacacagaaagaccctgtttgaaagagacaancaacancnncgaanncaaaaactaanaccanagcatacatctggactggggatgtanctcagttantnnaatgcttgnctaatatgcatgagaccctccctaggttggattctcagcaaattcctgaccagcctgggatacatganaccctgtcaaacaaacaaacaaacaaacaaacgaacaaacggaacctcaagataaa

SEQ ID NO: 722 - DNA, 370 bp, Mus musculus
  misc_feature (1)...(370): n = A,T,C or G
cttcctgtgcaagatgctgtgtggaaagacagcggttttttcgttaagatgccaacttggggctggcgagatgtctctgcagggaaaggcgcttgccaggaagcctaacgacccgaggtcgtgagctggtgggagagacccaactccgcaagtcagcctctgacctccacattcaggtatttccttctnccccccncagccacccctctccccaatctntaacgtaaataaatacagcagggtggnggtggtgcacacctttaatcccagcactcgggaagcanaggcaggcanatttctaagttcgaggccagcctggnntacagagngagttccaggacagttagggctatacagagaaaccctgtct

SEQ ID NO: 723 - DNA, 351 bp, Mus musculus
  misc_feature (1)...(351): n = A,T,C or G
gaactgaggattttgttacaccagnaaaacatttccatattgtactgtactttaaaatgcctaaaataaacggcctgctgtcagactctcgagtttgaaccaagaccagctactgagtcatgttgaactggatttctgcgtgcctcactcagatcgcagttcattgctctgccagccctggtgtttgcagaggcctccgcaatctgtgggccaccgagatgactcagcaggtaaaggtgcttgcagccaagcctgacaactgaagcttggtcctcaggatgaattcgcatggtggagaggacctnacacctntctctgatgctcacacacactgnactcccacccacacat

SEQ ID NO: 724 - DNA, 330 bp, Mus musculus
  misc_feature (1)...(330): n = A,T,C or G
caatgtcctgaatctacacacctagaanaagatcataggaggactntttcactgtcnccgnnagtcaccagttctagccggaccaggatggccagcttccctgggaaccccntctctgattccccagngctggggttacagngatnatgagagaactcggagcgcctgaaggatgatggagcngatgagaancggagccgggagtnctggggtgacctaangcnganccccanctgccggnactcaacactctntggaaggaggaatgagctttcnttgntttgaaacactgtgattttggagttgtctgatgngggagttagagcttat

SEQ ID NO: 725 - DNA, 321 bp, Mus musculus
  misc_feature (1)...(321): n = A,T,C or G
gactgagcaaggaattctctttttccctattatcagtgagaaaagagtccaaaagaaaacatgtcagctatgattaacacggaacatagtctgaatgactgtgtgaagnctnccctcnnccatncctgagacctgcttgctcatgggaggagcttnctgnncatttgtgctgccacgcccactgctggaacctggggagccacncactgtgcacctttntactggaccagagattattcngcgggaatnggntnccntcccccttncttcataactgagtgtngcancagtatnattggagctttgatcagaaaaaaaaaa

SEQ ID NO: 726 - DNA, 119 bp, Mus musculus
  misc_feature (1)...(119): n = A,T,C or G
atctgaggaaccaattctctttttccctatnatcanccgagganaagagtccanttgnaganatgtcagctatnattagcacggngtntagggntgaatgacctgtgataactgtaccc

SEQ ID NO: 727 - DNA, 271 bp, Mus musculus
  misc_feature (1)...(271): n = A,T,C or G
gaactgaggtatttctgcactattcctgagagttcaaggggactggtcaagacgagggaaaagccactggaacatgaatgctcttgagtccaggancatggcagagagaatacagaatgaaatgttttgtctggtgacactgantaagaactgttgacagaattcactcaaggaatgaaagtggcttccccttagaagatgaggctattaaaatgagttgtcatggattttccatggaaataaaaatcattattctgttcaaaaaaaaaaa

SEQ ID NO: 728 - DNA, 290 bp, Mus musculus
  misc_feature (1)...(290): n = A,T,C or G
gactgaggtgtctcggaacaaggtttctctgtgtagttctggctgtcctataactcagagatccacctacctctgattcaaaggactaggattaaatgcccggttaaagaagatactccagggctggagagatggctcagtggttcagatcacagactgctcgtccagaggtcctgagttcaattcccagcaaccacaaggtggctcacaacacctcttctggtgtgtctaaagacagcancagtgtattcatgtacattaaatgaataaataaattgtaaaaaaaaaaa

SEQ ID NO: 729 - DNA, 292 bp, Mus musculus
  misc_feature (1)...(292): n = A,T,C or G
gactgagggaagcctatgaacccatgttcccgaacaaccatatctgggntgctgatggcngaactacaacttcaggctgtgaagagacatctgaatgttgcatagcatgagtcggaattacatggggctatctctagttccctttagcagtcatntgntaaacactgnctgagtntacatctttgcgactcctaggtgcagcttttggaatgcactgcaggaacttgctagaccactggtgcccaccgaccccgacactctgcctttgttgggcccccatcccccatatgtt

SEQ ID NO: 730 - DNA, 166 bp, Mus musculus
ctccttgcctccctcttgtctctctcaagctcgtccgtttaacgctggcggttcatgaatccggaagtaaactgccaaaacaacggccgccacggaccgggccaggcaggacctggacaggcacttacacacaggcagtaaaaagtaaaattctcaaaaaaaaaaa

SEQ ID NO: 731 - DNA, 130 bp, Mus musculus
  misc_feature (1)...(130): n = A,T,C or G
ttgccataggacagtactncctncacancctgcaccacctacnactgaanngnggggcgagcccgcttgaggcttgctgaagngacacacacgtgcngnnacatctgggagacnttcttataacttgcta

SEQ ID NO: 732 - DNA, 114 bp, Mus musculus
  misc_feature (1)...(114): n = A,T,C or G
catgattcaagagccttggacttnaccatnctcctaatgnaatnngggaccttctgnntcctggatactgtgattgtatcatantcctncttttganatactaaggactctaac

SEQ ID NO: 733 - DNA, 172 bp, Mus musculus
  misc_feature (1)...(172): n = A,T,C or G
aactgagagccctgcaagggctttcagcagcacatggaacagatgtnngtctacaccccactcctgtgacaagataactggaggtngatggangataccttcagtcctgcatccaaccagtggcaaagcacaccagaggcacagcagcctcctacagcagacccacaccaca

SEQ ID NO: 734 - DNA, 241 bp, Mus musculus
  misc_feature (1)...(241): n = A,T,C or G
gaaaacactgaagattgggngnntccttccctgcaatagcccctgggtcttccagacagcaggaggtcaggngccatgccggctaagaagcgagagatgcttatataagatctgatgataccgtttgaatagtgtctcctacaagagatgttagttggtaggctttgggggatgtgatttgacactgngggctntganctggttgaatcaactggntaagcttttgggattaactggatcc

SEQ ID NO: 735 - DNA, 190 bp, Mus musculus
aactgagtgctcagtagaactgtcacagtctgcacatgaagctgcagcgtcccctgtatgagtgatgagcctttggcataggagcgccccggtttcgagagcgggagttggtttggcagcacggaggacctagattcctttggctttcctgcttcacccatgctcttagcgccatctcagcagccaacac

SEQ ID NO: 736 - DNA, 410 bp, Mus musculus
  misc_feature (1)...(410): n = A,T,C or G
tttccacaggcaacagntacaaaggaacatcttancnccngggtgttgtgntttaaaaantggttgccaaacttgagctctgccagctcttccaagaagncaactttctgtctcattcgcttgnaatgctggaaggnttctgaaggtctcaaagctcgaggacacccacaggccaacccaaggtggcgatcttactncaggtccttgcaaactctggcttcacttccgttgccacagnccggaaacccaagggaaacacctgcaccagatgaagccccgccccaatccttccaaccccccaagcgaccaaggagagntaaattcctgctttccagaagcttccaggctagcaaacgccatgcttcttgagnttgccttcccggngaatgggntctgcaagagtcatccgg

SEQ ID NO: 737 - DNA, 157 bp, Mus musculus
agactgagggcccaggaggacaacaatacaaatgttcatgatctgcacccagtagacaaccaacgttgaagaaatggacacagagtactttgatgcaaacgtcaccggctctaattttttctcacagtgtttctatcatgagagatgacagtgaaaa

SEQ ID NO: 738 - DNA, 188 bp, Mus musculus
  misc_feature (1)...(188): n = A,T,C or G
gaggacacccgacaccanaagctctannngtgnagatgccctaccaccatgatgtgaagggctctgccccaccgtgttctcccagcctcgatcagatgcagatgcacctntccagctccgttctgtaattatttttaaacaaattgcctttatcttttaaaatattaaaattaaatttcttttgagga

SEQ ID NO: 739 - DNA, 172 bp, Mus musculus
  misc_feature (1)...(172): n = A,T,C or G
cccaccccagggaggttggaaaanaaagcctttattgacccccgttaaaaaagncccaagaattaangnagacngggtgggnaaaanggagttcttttgaaaaaggtccccccccccctttcttngtgntngtnncccatgncggaaaaaaggccttggaaaaaacttggaa

SEQ ID NO: 740 - DNA, 308 bp, Mus musculus
  misc_feature (1)...(308): n = A,T,C or G
aaactctcagttcctncagcaccgngtgtgnctgcacacttgccatgcttcctgncatgatgataanggactgancctctganagtgaagactgcccccantnaaatgtacntcnnaaccagtatnncttgggggcnggaagaganggctcaccgnntaanatcacncnacgtgctcttnccgaaggtccnggagttcatngctcaagnaacccacatggaggctcacaaccattgngtaacaaggatcttgacccccctctttctggagtggtcnagaaagacagctacaggggtacttacatataa

SEQ ID NO: 741 - DNA, 103 bp, Mus musculus
  misc_feature (1)...(103): n = A,T,C or G
gacaatttaaggccctggangaagatggncttgaattacacacnagcnnccaacctctttnggtggatgcaacaaggaactggttcctacacacatgggatgg

SEQ ID NO: 742 - DNA, 147 bp, Mus musculus
  misc_feature (1)...(147): n = A,T,C or G
cttgctgacggaaggcgngaccntctcatataacctgccttncgaactgcctgagctacccactcctgcttctccggggggaccntgcaagctcccccgggaggtgganaaatgaaaaaggcncttcccccctttgaaccttttggg

SEQ ID NO: 743 - DNA, 330 bp, Mus musculus
  misc_feature (1)...(330): n = A,T,C or G
ttctgaggtaaaaccctgcccctgagggcctnnctnacttttttgtgggaactcctcaaaangtcggtacagagaggcatgggcttntcctncattatcanangaaggnagggaaattgaacgggggagggttggctagtcctttggnncccttcttncagggcccccaagggngggaagagccaanaccncnnttcgcttntnncaattcttannactggctnaaatccccgnggcccctggnantttttggnaagnttaaaaaccaagnagtgggccanaaaggccattnggaccatncattaacaaaagacccccattgggcaaatg

SEQ ID NO: 744 - DNA, 273 bp, Mus musculus
  misc_feature (1)...(273): n = A,T,C or G
actgaggagtgttttgcctgcttgtatgtgcacccattgccggccccagagaagggcatctgttctcatcacttaggaccgaagtttcagacagatgtgaactgcaatgnggcgctagaaaattaactctgggtcctctggaagatcagtaagtgttcctaactgctgagctctcgctccagcgtcagacttgtgtttcttacactcaagagtaacttagcatttatgtcctttcacgantaaagcatgggtatattgctgaagtctgaaata

SEQ ID NO: 745 - DNA, 106 bp, Mus musculus
  misc_feature (1)...(106): n = A,T,C or G
caacaccggggcctccntttttctnacttggnaccaagaanaattatttcgggggggaaantggggggtcccccctccccccttttcttttaataaactgggggga

SEQ ID NO: 746 - DNA, 128 bp, Mus musculus
  misc_feature (1)...(128): n = A,T,C or G
taacctcaagctgggttcccgtnttnctgggtgnaggccnagcacagtatccacnngttggtnaccntcangggaaaancttagattttnctaaaaggcgaagggtaaacnggaaaaaacctaggaca

SEQ ID NO: 747 - DNA, 297 bp, Mus musculus
  misc_feature (1)...(297): n = A,T,C or G
atgctttgggtcactgttgtnttgcagnacactagatanngactaagacacttggcttaacatgntagaggcctgggctcaagcccctgtntacctacacantgcctgcagncaaaganatttgangcgggctgnaggatggctcagtggataagagcactggctgctcttccagaggtcctgagttcgattcctggcagccacatggnggctcacaaccatctgccatgggatctgactccctcttctggcgtgnctgaanaaaggcaaaagnaatctcacattcatgaaataaaa

SEQ ID NO: 748 - DNA, 259 bp, Mus musculus
gactgagtgttggtggcaggtctctgtggtccttgtgagtaggggtcttttgacgaactccaacactccatctacgaactgctagagcaagagaaggagctgaagctgcaggatcgccatgacacagtaaacaacaggaaatctgagaagaatgctggtgaggatccagtattgataacatagcaaagggcagactcctggaaccagaccaaagtcattacaatgaacatttgcaaataaagatatataaacaaaaaaa

SEQ ID NO: 749 - DNA, 139 bp, Mus musculus
  misc_feature (1)...(139): n = A,T,C or G
gactgagacctccggaatcaggntgcgccttcacgtggtagctaccgccgaaaatgctgtgggatagctgggctttttctaactttcctctgtcttggagacattaaattaaaatgaggccaaagcttaaaaaaaaaaa

SEQ ID NO: 750 - DNA, 298 bp, Mus musculus
gactgagggtttcattctgtaactcaggctggcgtggaacttgatacttagttcaagtctgatcttgggcttgctcttttaaaggttcttgggtgctggagtcatttatgaccggagtgattggccgtccgagctagcaggctgaagctgaaaagtccaggctcagcgagaagtgtggcctcaagaaaactgcttaagcatgcgtatatgcacatcttcttcagcagccctgtttcccatgggttagctaaactagtcaaaatgaatgagcccctccctcactcctcaaaaaaaaaaa

SEQ ID NO: 751 - DNA, 284 bp, Mus musculus
  misc_feature (1)...(284): n = A,T,C or G
actgaggtggcttcgggctgnggtagtgcctgngcggcannccatngtagactactgtgggnancnntnnnaggtccggacaggaagcatgnctngtnncataaaacagaaaggcagangaagtnntgcctgctctgtgcattcacttctgtagtaatggaaactatcatttgtcatttttgtataaaacatgatttatgtactccaggctgagctcaaacttgtaattctcctgcctcagcatggtgaatattgagattacaggcatgagccaaaaaaaaaaa

SEQ ID NO: 752 - DNA, 297 bp, Mus musculus
  misc_feature (1)...(297): n = A,T,C or G
gactgaggcccctcctcatagtgaggcttaggaccaggcattgnnaatgcagctaagtcatctacctggcattactgttgattacacagtaacacgaggataatacttatgagagagagagagagagaanagagaagagagagacgagaagagaagagaagagaagagaagagaagagangagaagagaagagaagaganttatttattttacttaaaattatgtgtggggttatgggagtatgngtataagccagaagagggagtcananccnttggttatcggctactgcgggtc

SEQ ID NO: 753 - DNA, 290 bp, Mus musculus
  misc_feature (1)...(290): n = A,T,C or G
tgagggccgaaacagcccgtggtagctgcctctctcccttcaccatgtgagntctgggaattgaattcngatcttcaggcttagggcttgnaggcaagaccttnacctgctgagncatcttacaaaccctttccctggagctagaaggtaagtcacacactttgtaaaaaggtttcagtgctaactcttgattgaatatcttacagatttggaaaaacatcggaaagaacaggtgaaaataccagttaaagatttttaaagaagatatcatgcttggatgaaaaaaaaaa

SEQ ID NO: 754 - DNA, 188 bp, Mus musculus
  misc_feature (1)...(188): n = A,T,C or G
tgagaaaaagaaagtaagaagaagaagaagaagaaanaagaagaagaagaagaagaagtatgangangaagaagaagaagaagaagaagangagtgcctgaccactggactaantatatgtncagttcttctctanctgatantaataaaatcttcattgatttacagtgctgctcctcacaaggatt

SEQ ID NO: 755 - DNA, 179 bp, Mus musculus
actgaggaaatggtaacttcttagtccaagaagaacaaacacacagtgaaagtgcagttcgcagcagatctgcagtgctcaaagctactgttacttcaaatcttcatcacaacactgaaattttttacttttccacagagctttacaaaccatcctattaggaaagctaaaaaaaaaaa

SEQ ID NO: 756 - DNA, 172 bp, Mus musculus
  misc_feature (1)...(172): n = A,T,C or G
agttgaaattaaattctcctttatantattagccccaagaagagagagaaaaagaagcataaagnaatgagtgagatcaagaaagaaaatggagatgtaaaggatttnctnnaaagngggaaggngaaccccaaaaccaattttgnagacttnccaattaaaaaagtaaaaa

SEQ ID NO: 757 - DNA, 205 bp, Mus musculus
  misc_feature (1)...(205): n = A,T,C or G
actgagaacaccagaagaangcatcgggtcccattacagatggttgtgagccaccatgtggntgntgggatttgaactcaggacctctggaggagcagtcagtgctcttaaccaaccgctcctacattttattcttattgtgtgtatatgtatatagtacatgtgtatgccacatttgtatatgatgagcttttaaaaaaaaaaa

SEQ ID NO: 758 - DNA, 108 bp, Mus musculus
  misc_feature (1)...(108): n = A,T,C or G
actgatgcctttcttagtagggagcacttttgngatacctcancccggacangaggccacgaggngncagcnnaggactnagnctgaaacttaaacccccgagccaaa

SEQ ID NO: 759 - DNA, 185 bp, Mus musculus
  misc_feature (1)...(185): n = A,T,C or G
agttaagaacacttgctcttncagangacccaggggngattcccaggacccagagantggctnacnatctgtgactncagggatgtgacaccctcctctggcctgnatgngcaccnatcacaagtggancagaaatgtacangggagacaaaacactcacatatataattttaaaaaccacctta

SEQ ID NO: 760 - DNA, 105 bp, Mus musculus
  misc_feature (1)...(105): n = A,T,C or G
gatatttccaggaagaagaggatgtgttgatntgtntctgcctttgcgtnnccctcngacaaatgtcctacaagattagactgcgacacaatatggaaaaaaacc

SEQ ID NO: 761 - DNA, 335 bp, Mus musculus
  misc_feature (1)...(335): n = A,T,C or G
ttctgagtataccagtcgcgactcatcaagtactactnaatttctcgagggagagctgtcttcccgtccatgtaaaacacctgaggagttnttctactagtcccncttgaggctcanttccttcacgagtgccatgagcattaggccgaagggaaggagaggaatngatgccatttaactcaagnttaaatggagccatgctgccgttctcctctgagagcttacccngagaggtcagcctggagccttggtancgtggtccctganaagatctgnctccttcaagttgnctgtcngctgcaacttgcaatttctgtctcctttcttctcggtga

SEQ ID NO: 762 - DNA, 185 bp, Mus musculus
  misc_feature (1)...(185): n = A,T,C or G
actgagcataacatcaaagcacanaattaaggggnaaggccaggngngganggaaaagnagccttaaggtatgganggaanccanaaagaaaatggggnnggtaannatttactggaaagggggaagggnnaacccaaaaccaattttgnagacntnccaatttaaaaaggtaagaagaaaaaaa

SEQ ID NO: 763 - DNA, 195 bp, Mus musculus
  misc_feature (1)...(195): n = A,T,C or G
tgaggtatcttctgcgaanaaaagatgggagttgcctcgaggtcatcatgggaatctaaccatatcccctgcattgcaccttgggtgctaagttcctgtggcagaatatctgatggttccaggaggaaggaaaatgtctggagctgctgctgattcattacatggagttntacgcttttctgtcaaaaaaaaaaa

SEQ ID NO: 764 - DNA, 520 bp, Mus musculus
  misc_feature (1)...(520): n = A,T,C or G
gactgagctgatcctggagaagcttccgctcctgtggcctttgatcagtggccaagatgaacaacttggcacagagaaaaccaggcccttggatatgaaaaagatgaaaagaatgaaatcccccagggcagaaaatgttcaaagatgtaccaaagaagacgtggaagcagaatcactaataaagtaattcaatagccggagaaaaatcagccagcttatgaggaaatctgggtgaagccaagtcatccagcatgctaacgttttctagataaagcagtgtctgtctgagatgattaatccttttttaaatgatttaattagttatttaattcataaacagggtctcaactatgtagccctgattggccttgaacccacaacgatctaccgacctttgccttccaagtgctgggattaaaggtgtgccagcagaggatgtggggacccccgagactgtagttacagatggttgngaaccatatgagtgttgggaataaaacctggattctctggaaaaata

SEQ ID NO: 765 - DNA, 106 bp, Mus musculus
  misc_feature (1)...(106): n = A,T,C or G
atcagctgtatggacacactagacgagggcancactatctcattgngggtggtnagcatncactgaatatntaanangaagataagataagacaagatataatcaa

SEQ ID NO: 766 - DNA, 169 bp, Mus musculus
  misc_feature (1)...(169): n = A,T,C or G
gtctgaggtgcctttgggcagggtcaagnctnnacagcacgccctagctnttntntgaggagcnctcncaggtcccgcaaggatntggngggtnacaaccatccatnccgganncttgatncctttttctggagtatctcgaggacagctacagttgtacttgcatata

SEQ ID NO: 767 - DNA, 201 bp, Mus musculus
  misc_feature (1)...(201): n = A,T,C or G
tgtgtgaccaccttgntatgctgnntgtagagccccacctatttgccttgcgganatctcccgtgctgaagaccncctgaccctgacctttgngagcccgaatcttttccatgtccaatgctgagcttgggaaccctgcttttagggaaaaacatcccatgtgtacaaattttcaaaaagcttgctctaattaaaaaaaaa

SEQ ID NO: 768 - DNA, 108 bp, Mus musculus
  misc_feature (1)...(108): n = A,T,C or G
agtctgctacaagaatttcacaagtctcatgtgatctgatgccntnttctgacctctgcagaccacatggctacacacataagnagattaacttaagatagcgtaaaa

SEQ ID NO: 769 - DNA, 221 bp, Mus musculus
  misc_feature (1)...(221): n = A,T,C or G
gaagtcctttttacccantactttacgnctgtctaccaaatcatgnaggcnnngantgtgtcataattgaaagccactattttgcttacataaagaagaatccacaaggcagaactggtgtagatgactctggtngctaaaggggcattgcccctgangcctatganctgngtntagtccctgcngacttgacagtgggaaaagagttggtatcttatcaa

SEQ ID NO: 770 - DNA, 144 bp, Mus musculus
actgtacctgatgcgggtggcattgtccaggcattaagttgtgtgcctttgttcctgggagaaagggaagcatccagtcgtcactaatatcagttcatgcttgatggtgttttatgctggcctcccatgagtgacctgttcagg

SEQ ID NO: 771 - DNA, 130 bp, Mus musculus
attttgaagcagagatgactttggattcctgacccacctgcctcttcccaagagcagggcttacaggcctgcactaacacatctggctgaggttggcctgtctttaagattcatattggaggctgtgggt

SEQ ID NO: 772 - DNA, 270 bp, Mus musculus
  misc_feature (1)...(270): n = A,T,C or G
actgaggcgtgttttgtggagttctccagtggcagcaagagtgcagggnanccatgagaatccagctgnctgcgctgaagctgacttaaggaaatgtgcagggtccagtgttgttgtgcacaccaggggatgctgaggcaggctgttcanagccagcctgggttccataatgacagaaaggaaagactgcaaacactaaggacactgatttgaacagggaagtcgaactcatttcaataaatacacagggagggggggtgttgccatctt

SEQ ID NO: 773 - DNA, 288 bp, Mus musculus
  misc_feature (1)...(288): n = A,T,C or G
ctgagactagcctagcataactgtcttctgataggcttcatccagcatctgatggaaacagatacagagacacacgcccaancattaagtggagcttgggagaattccttggaagagagggatgatggactgaaggagccanagaggtcaagggaccccagaagaaaacctacaganttanctaacctgggttggggggactcacagaaattannttaccaaagagcatgcagcaggaacgcagatgtctcttgactgttaccttgccttttgaactcctttttccta

SEQ ID NO: 774 - DNA, 191 bp, Mus musculus
  misc_feature (1)...(191): n = A,T,C or G
ttcagccaacccccagtccctgnctcaatcctctgatttggtggacttgcttcttggncaaaggcctcctgtagcttnccactccagctccagnnngccnnncngangtcccancttgngngcacacatgtgccatgccagggctctggagttcaaaggnggccctganggaaccgagaaggcaggttgcc

SEQ ID NO: 775 - DNA, 213 bp, Mus musculus
  misc_feature (1)...(213): n = A,T,C or G
gaagaggaacaggtgcccttaaccacggaggagacntctctccagccacccnaaatacatttctttntaagcttctaggggctggagagatggctccaaggttaagagcactgactgtncttncagaggnnctgagctcaattctcagnanccacatgggtggctcacanccatctgnattgagatctgatgccctcttctgggtgtgcttga

SEQ ID NO: 776 - DNA, 266 bp, Mus musculus
  misc_feature (1)...(266): n = A,T,C or G
gactgagtctctccgcagantgaagganccgcaggcanagctgntgaaggagcccgactctctcacgcgagttaacaggttcaccctcctcggatggaaaatggagttttcacccattgccagagggactttctcggtccttcacaggattttatggtggcacgaaagtgtcagagccgactcacctcagaatcgctggccacttctaagtctctgaggaattaactgggaatcaacccaggagctttctactcagaaaaaaaaaa

SEQ ID NO: 777 - DNA, 310 bp, Mus musculus
  misc_feature (1)...(310): n = A,T,C or G
gactgaggtggggtctttnttctcctcgtgggatggtgcgagtctgcgacctgctcntgaagaagaanncnccgcagtactnnnagcagcagcagccgccgcaccacnaggccaagctggaaccggacttgccgacccccgagcagcagcgaaagcagnagcgacagngacaacagcggcggcggtggctggtggaggaggaggaggaggcggcggcaccagcagcaacatcagcgaggaagaggaggacgacaacgactnggatgaggaggtttntgaggtgtatttatttnttgtagggtcacactgt

SEQ ID NO: 778 - DNA, 240 bp, Mus musculus
  misc_feature (1)...(240): n = A,T,C or G
gatctgagtttctgttcagatggngctctgtattttcccgtgctggaagggaagcgtgcacttcncgggcagaccancctacactcgaccacgtgaccaggnctngngggagncacanacctataaacccagctctcntgaggntanggntggangatcnatggagagttaacaggccagcctgggctacanctnnagaccctatctaaataaaagcaaggccaaccaaccaaaaaaaaa

SEQ ID NO: 779 - DNA, 268 bp, Mus musculus
  misc_feature (1)...(268): n = A,T,C or G
gactgagggtttctgtgactcctgccctgccgtgtgactatgaaagccaccgtgctgctcctctcttgggccgactaggccctgggcagggtggcgagagtgctgtgaaatggaaggaaggaagaagagggagagagaanatgcaagccatctcgggacagcgtagacagagcacctacccagcctgtcagggtttggttttaatccccatctctgcgaaaaacaaccaacacattaaaaataattattatgggtgtaaaaaaaaaaa

SEQ ID NO: 780 - DNA, 132 bp, Mus musculus
  misc_feature (1)...(132): n = A,T,C or G
atggagcaatactcctccatggcctcagntcctgcctccagatttntgcncttgagatactaccctgacttccctgaataatgagctacaagttggnagaaaagataaaccctntctttcccagaaaaaagg

SEQ ID NO: 781 - DNA, 420 bp, Mus musculus
  misc_feature (1)...(420): n = A,T,C or G
ctgagctgctcctgctgaataagtcacgtgtgaagccagaagcaaatggcccctgcctcctaggagatacaactgcttcctcaggtcctcaggnngtgnataannaactgcatcanactcttcgcggcaantgctttgnaaagactgcanacaggaaatggaaatgagggcagtgaccattttgagctggaggatctggatctgggaggcggtgagangcacagctcgggcgggaactgnctgatnggcctcanaacgaagagcctggaggtgcaggttttacctaccaaaagcagacctgccttncaaggttccccccggnattccaaaagtccttacttggnggaccctgcccccaaaccctgaacttttcnaggccntaacctggnccttttccttggggnggggaacttcccaact

SEQ ID NO: 782 - DNA, 110 bp, Mus musculus
  misc_feature (1)...(110): n = A,T,C or G
cggtaggagactctctcaaanccgngntgcctggaatgtttcacactcattagangtgcccctacaatggacttttntgaacatgngctgtccngattacatacatccca

SEQ ID NO: 783 - DNA, 239 bp, Mus musculus
  misc_feature (1)...(239): n = A,T,C or G
aacccagggctgttcgntaagaacagtcagnggctcactgcctgaccggccatctcttagctatggtntgagaaaaggtctggcttgagaatgccctggngctttctctacaaccccanntggcctnaacctgcggcagtccnncaaanctccatcttntgngnncttaccatgccatctanagaactgaggngaaaccgtttctaaatagnctganaattaaaccccaaggggcctaa

SEQ ID NO: 784 - DNA, 418 bp, Mus musculus
  misc_feature (1)...(418): n = A,T,C or G
tgaggctggaccaggaccagaggcagcagntntattccttcnaatgccagggcnttctatggcttgtnttcagaatctctgaagcaaggctggctaacaatgcactacttgattgctctgacttgactctcacccacagcattgagacaggaggagcccttagccaggggctccacacaagaaacctggtttnccagcctcctccattttgtctgacgaccctttcctcagagtcccnaagaaatacaggacaaagatctcngtttnctccctttaaagatcacagggnggcccacatnaanccgcccagaccttttttcttcctggaangntggcaattnaatcaaanaggtcccgggctcanataaatttanttaacctcnncttatcttttaaagnccccccaccccaaacacca

SEQ ID NO: 785 - DNA, 110 bp, Mus musculus
  misc_feature (1)...(110): n = A,T,C or G
tacttcctgtggactctcagaggtcgaacaggagcatggctgcntcccatatatgtnctngacncnaancgatgattncgagcncggtacccggggatggaaaaacaaaa

SEQ ID NO: 786 - DNA, 408 bp, Mus musculus
  misc_feature (1)...(408): n = A,T,C or G
cccctgctgacacctgaggcatcggtggatgtatagaagccatgatttatttgngctttcagtcataagttnctccntttggcttttgggactagaagaatatacaagagaggacctgggcctagaaagtaactacactggaacagactgggcaatccggggcaggaaagaccccttccttcctctgctgngcacttgattctatgttcaagctggtgaaagaacaggaggaccagcggggccttccttcatctcacagagctagcctgatgaanaaccagaaagaangncctggtctcttgcccgatctttgnctcttgantattgnncctnctgtttgngaagcntactggnaatcataggcnaacaatattgaaaactaccgngnccccgggaaaaaaggcttaa

SEQ ID NO: 787 - DNA, 388 bp, Mus musculus
  misc_feature (1)...(388): n = A,T,C or G
agggcctaggggggcgcctgctgtncnagatacgggctgatnctgagtcgtnncangtactgtgaacaggtttaatcaagantnggactnggcangntngagggagccnnccccaccnnagancatttgaacttggccnctttgggngnnnnacttcncgtgactggganagctttgtggggaaaccngggcctaccttatggactccaaagtgcgggnttagctgtcactttatcctacaaaatgcccnccaggtgtgcttnaaggacactgtgcggaaagtcccctcaagggcagtcattgcacacaacccaaaccccagacccccgnnggccaacaagatnancacnntttttngctgtttttaagnttattttaatttaaatac

SEQ ID NO: 788 - DNA, 151 bp, Mus musculus
  misc_feature (1)...(151): n = A,T,C or G
actgagtttctgtttcaatgcaggcnaancagctancttttctgaaacatgccattaaaagaagtcatcaagcttttgnnnnaacngcannctgcatcaaggccaacaccagataatgagcanatgccagatgacaccacacaaagataga

SEQ ID NO: 789 - DNA, 231 bp, Mus musculus
  misc_feature (1)...(231): n = A,T,C or G
actgaggagctggtgagatggctcacnngttaaaagcactgactgctcttctgaagtcctganttcaaatcccagcaagcacatgggggctcacaaccatcttgtaatgagatctgacacactcttgggggagtgtnctgaanacanctacactngaccttatttggaaatcnataaatanctcctgggcccggccgaacctanngaagttgngccagaaccgagcaaaaa

SEQ ID NO: 790 - DNA, 370 bp, Mus musculus
  misc_feature (1)...(370): n = A,T,C or G
acttcagtccacatgatggaangnagaaccagctngcctgttacntnntncctgtgaccccnacnantgnactntaggctctngtccaaacacncaccanatanaggantacntgacattttgtttgtttanatnnnctnagntccagcatgacttctatncgtccgaggagctaccagngttaccatcacaagaagtgcctcgcctgcggncagnggtgganagccaggccttcaggaacatcctggtagatgagatgggacatgatggtgtnacgggcagccactgtcatccaagccagctgnaagggctaccggttgcngcanaaactcatctcccagatgacagcagccaaggccatcccaggagg

SEQ ID NO: 791 - DNA, 446 bp, Mus musculus
  misc_feature (1)...(446): n = A,T,C or G
tgagtgctgggatgaacccagggccctgatcatgctctgcaggctcatgctgctgactgaacctgctgctggaacctgctgctgggaaactcatttttaaagcaaacaaatgtcactgatgctcagcaagtgccaagaatattcagctgggaacctgtgctggctaactttatgtcaagatgacacaagttcaagtcatcatcagcgcggaggaagcctcagctgatgagtccatgaaggaattttctcaattagtgaatgatggggaaaagcccagtccattgtgggtggtgccatccctgagctggtgagcaagcaagccgttgggaacaaggcagtaggcagnatcttccatgncatctgcatcagggttcctgcctttgactttcctcagtgatgaaagtgatgngnaagtgtaanccanaatanaccctttcctctcccgg

SEQ ID NO: 792 - DNA, 178 bp, Mus musculus
  misc_feature (1)...(178): n = A,T,C or G
aagtactgaaggtcctcttgaanttgggaactggtgtccactggtgtccgcccttaaaggactgggaaangagnctaagnangatcttggccttcaaaaaanccctttgggcccngggtaagcggnngccacaaccccctttacttcccanncgctttggnggagggcaaaaggccag

SEQ ID NO: 793 - DNA, 138 bp, Mus musculus
  misc_feature (1)...(138): n = A,T,C or G
actgagcttcagcaggctccagcccgttggtgagnactcccagcttctttngattcgggtgtnatgtctgtttgagtggacnggnnctgcagctgctgatnggggtttggtgntnccctcgngcgacctagaacctaa

SEQ ID NO: 794 - DNA, 115 bp, Mus musculus
  misc_feature (1)...(115): n = A,T,C or G
acttagagttcatgaatggtnggccntcncactgacaagattccnagcttgncagaggcctcaaccatcaatacccccagncgctcttcagtttagnttaagttccaagtatgtg

SEQ ID NO: 795 - DNA, 271 bp, Mus musculus
  misc_feature (1)...(271): n = A,T,C or G
tatttttccactagttgactcanatgaatcagttcaccttatacatagtatggntgagctcancttgggataacaccgccattgagagaagaaactcgcccaagaactgcttgngaagtncctgcngnngattgccattttcacgggcctnncacttcaggnnatttngnnangcctantggttncttnaggattgaattacagctgcctgggggtctgcgtnctgaaanggactgnactgaagctgntggtttgggcctggggtctgcct

SEQ ID NO: 796 - DNA, 315 bp, Mus musculus
  misc_feature (1)...(315): n = A,T,C or G
gtgtgctatgtagactacagtggccctgagctnacagagatccacctgtccctgctttntgggtgccctaaagatctgtctgaatgaanaacacttagctaccctccancaccatgcctgcctacatcctgccaggaagataacggaccaaacctctgaaactgtaagccagccccagctaaatgcttccttttataagagttgctgnggncacagtgtctattcgggacagnancacagngnctcggacacatactatcaacagatctacaccacaggaaatagtangggaaggncttcatataaaagaaataa

SEQ ID NO: 797 - DNA, 416 bp, Mus musculus
  misc_feature (1)...(416): n = A,T,C or G
gactgaggtgctggatggcttgtgccagngccggctcggatgcnnnnnttagnacnatnttngctctccnggcctgatacnngnngcnntgcgtatcgntaccaaggcaaaggcaccnttttctctggantantttgctctagccacatgctccccacccctattggcacanggcaagtgtctnaaacagcccatgttaaagaagagagggtgggccactggacagtggtggcacataaccttcaatcccagcacctgggaagcanaggatatcaaccctgtgaggtcggaaatttgcnccatcaatctgcattactctggggacaggggaaaccggagcagngctcggagataaaggagcgacgggagctacnaacaaggagataggaagagcancctccgggttagggcactta

SEQ ID NO: 798 - DNA, 235 bp, Mus musculus
  misc_feature (1)...(235): n = A,T,C or G
ttccctgagcgggcctcatcacactctttgangattncctgaagacagacaganacgtcatnaggtcactggtggttgaannacanaatactcacttcntgattggcttatgacatntgccctagactctgggncttccccctgnccnctctgatcatccantnggatctctaatgntnctgccttctagcnaaccctncatgactataacaggctatactgggttactaaccaa

SEQ ID NO: 799 - DNA, 302 bp, Mus musculus
  misc_feature (1)...(302): n = A,T,C or G
actgagatcctgccttgagtggctcaagcngatgcagctccctcacctgcttcattataaaccagcacaggaatctcaggaggctcctggaggccagcacacgagcaacagaagctgaatagccactggcgcattagctatagatgcccaaggactcttttctgctatggccacagaagtgggctctgaaaacaggaaaccgggctcctgagtgttgacttgnagatagagcagaggggagatgaagacaccggaggccaactagaaacagccattgggaagcctcacagggaaagggatgg

SEQ ID NO: 800 - DNA, 315 bp, Mus musculus
  misc_feature (1)...(315): n = A,T,C or G
acagacatttgaagatcccngtanactctgnccactgtgtgccctgcagctcaagccactacaatatgcnaatatggtggacagattggagaggaagagaagaggaacactgtnagcactgtnaagagaggcanatntggagacttgaggctaganaggaacaccatttnctgacnncctangattcannaggagatggcaaacngtctgctgaggctgacanaccncccactggggcngnttacgagntannggnccccnngccaactataangaganaggganncactgggctcccatgggaccgggggcccc

SEQ ID NO: 801 - DNA, 326 bp, Mus musculus
  misc_feature (1)...(326): n = A,T,C or G
atagctccgcgagcacgttactcttagccgcgtncagncntgcggtcggattcnacgcaccgntctgtcttcctccgacgnacaganctcaggaccaagggatgncnctgtncancccgccggctttccgganagaacgcgnncccaccggaccatctctgccccaaggntgnagagcgcgccggnccagnaccatgcgcgcgngcggntngagaaacctcagagactccattggnagctgctcncggngttgnttaanctccgngcgctagcnctctnnccggacagggcggacaggtccaaacaggaatcagccctaccagtga

SEQ ID NO: 802 - DNA, 101 bp, Mus musculus
  misc_feature (1)...(101): n = A,T,C or G
atttaagaattcatgggttgaanatggccacggggcnggtttcccttnntgnaaacgnttggncccaccagaacttngaattattttagaatccttaacaa

SEQ ID NO: 803 - DNA, 453 bp, Mus musculus
  misc_feature (1)...(453): n = A,T,C or G
atctgagggtcttgttactgaacttggngctnatcgattgagctagaacnactggcccntgtgcttcaaggggatcccacttgtntattccgagatcagagaagccatcatcagaganncttcctgggaactaacacagagacctcacaactggtataatgtatagagngtgagaagatttntggagcacatagtnctaantagattgggcttcatnatgaactctcctctangggantttcggaaacctattnataatgaanggctggnagactgtaaggttccagaaggcgcatgggatggatggttccccaaggaatccanggncttccagatacnaangagcgctgatgccncatatggaaccgccccagacctgtgngcccnaatgnncnagggntttntggcaagctttaaagccaaatggggggttcccacttacaggaagagggg

SEQ ID NO: 804 - DNA, 126 bp, Mus musculus
  misc_feature (1)...(126): n = A,T,C or G
gactgagcctcctgagtggcnacaaatactccaactattagganttaattggaagaccatnaggacctactcagaacnnactgagttnngggaaattacaggggagacccgccacatcacattcct

SEQ ID NO: 805 - DNA, 118 bp, Mus musculus
  misc_feature (1)...(118): n = A,T,C or G
gactgaggagagcccnaacatnagtagcacctggtattncaggagagncaaggctgtctanccttatgtgtatgtatgnaaacgtcttctgctcttcctgnccacacaacacacctgc

SEQ ID NO: 806 - DNA, 373 bp, Mus musculus
actgaggctccttgaggaacaccactcagccccagctgtcgccaaggtgcagccagccctgcaagggggctccagggagcctccctgtgcgacagctccagtttcagaccagcgtgaggagtcagcaggccctgtgcaccagttgttatttctgagcgtggaaggtggcatttgggtatcggcctccgcatcatcctgttcttgaagcagagttcacagaaccatggcagcacacacacagagtctaactcttaaacctgagaggccagagagaccccaggcccgggggctgattgcaggattctcttgtctggaaatggaaacttgaagtacaagtaagaggatttactggaaatgacatttaggcatttag

SEQ ID NO: 807 - DNA, 128 bp, Mus musculus
  misc_feature (1)...(128): n = A,T,C or G
actgagatgtgagctggctcagcaccatgttcttccctgctgncatgatccccaccataagagtgatggacgtttattcctctggaaccgtcagccccaaataaactcttccttctagaaaaaaaaaa

SEQ ID NO: 808 - DNA, 123 bp, Mus musculus
  misc_feature (1)...(123): n = A,T,C or G
actgatggctattcttgactgccattgatgggattcgganttgcctanaanacacccctggatgtctgtgggagngtttccanagtggtgtcactaaaatgagaagccacaccttatatgtga

SEQ ID NO: 809 - DNA, 197 bp, Mus musculus
  misc_feature (1)...(197): n = A,T,C or G
gactgaggaagctgtgccttgagagaatttgaagaggatcaagtcttgctacaatagagagatggagagcagcaaacatantgttcactaccatctgtaactccagtcccaggggatccagcaccctcttctggcttccttggccgctgcggtgcatgtgttgcacagacaggcaggtaaagcactttcacgcataa

SEQ ID NO: 810 - DNA, 114 bp, Mus musculus
  misc_feature (1)...(114): n = A,T,C or G
tggtggaaagaacgactctagggctngatcttaattnagttntcngccgagaaaagtctcttacaaggctgngcattatttatctaataaacagatatatctagaaaaaaaaaa

SEQ ID NO: 811 - DNA, 122 bp, Mus musculus
  misc_feature (1)...(122): n = A,T,C or G
ataaaattagaaaccttgancaggangaggctnnctgctttgggggcagaaggctcacatgcgactgcagcctgnagagtcttctggaggaatgctgacctaaagaacaagaggaatagaag

SEQ ID NO: 812 - DNA, 116 bp, Mus musculus
  misc_feature (1)...(116): n = A,T,C or G
gactgaggtggggtctttnacactgagaggtgacaactgagctgcatcttacagcctacgttccttaataagcactaaataaggaagaaaatgtaggaccaacgtttccaggctca

SEQ ID NO: 813 - DNA, 111 bp, Mus musculus
  misc_feature (1)...(111): n = A,T,C or G
agccattgggagggactcggtgctttattntgaggttccntaatgggaggaacgctgctagccctgcaaggangagacggggcngnttgaaagnngacaatcagttgaggc

SEQ ID NO: 814 - DNA, 214 bp, Mus musculus
  misc_feature (1)...(214): n = A,T,C or G
atttgagttacaaatggttgccagccatcatgtaattgctgggaacccaagttcccaaacactcaacaagtgattttaaccagctncgagatggtgccatggattaaaagctgcacctgccatccacctccatatatgccagnctggataagaacctttgttttgttttgntttgacagggtttctctgtgtaaccctggctctcctctgtatg

SEQ ID NO: 815 - DNA, 119 bp, Mus musculus
  misc_feature (1)...(119): n = A,T,C or G
ttcaaaacagctatttantanagttgtatccatctagnagggntcnaggggctttncttgtgtncnggnacatcattcataggtgggnggaggtntatctttcccggacccaccagaga

SEQ ID NO: 816 - DNA, 166 bp, Mus musculus
  misc_feature (1)...(166): n = A,T,C or G
ataatcgctggccgagcaaccatatnactttcaaattttggccagaaattgntnctnttcttncttcttttgtgggccagactacttaaatnttttngactttgganccttaaccntatttaaaagnaacacaaangggctggngagatgcctcagtggggaaaag

SEQ ID NO: 817 - DNA, 102 bp, Mus musculus
  misc_feature (1)...(102): n = A,T,C or G
agatttgtgccttgagttcctaccctgacttnctggatgatnacctacacntctncaantanaataaacnctttcttttcangccgctttagaaaaaaaaaa

SEQ ID NO: 818 - DNA, 290 bp, Mus musculus
  misc_feature (1)...(290): n = A,T,C or G
gactgaggacagaccctacttctaggggcagtggtggcacatgcgtttaatcccagcactttcgaggcagaggcaggtggatttctgagttcaaggccagcctggncttcagagtgagtttcaggacagccagagctacacagagaaaccctgtctcaaaaggaaaaganaagatnctgaaaagnanangggnctacgagaaccngntgagcntgagaagaagangagatgagacgagatganaggggaangngtgagagaaagaaagaaagaagcgatgcacccataca

SEQ ID NO: 819 - DNA, 274 bp, Mus musculus
  misc_feature (1)...(274): n = A,T,C or G
cagcgctcattgacagaggaatncngggcatacgggcggatgacngangncccactgactggaggctggagaattccactggcaagactgnntcgtganggtcggaggacnantnacatttgccaatgatttnaatctcgcttcaggcgctantaaattaganncnnacaaaggtttcggcctccgccctaaattaccctttatnttttgctggtnncaactcatgtttttgaagtaaaaaatttctaattggtttggcccctaaaaaaaaaaa

SEQ ID NO: 820 - DNA, 480 bp, Mus musculus
  misc_feature (1)...(480): n = A,T,C or G
tttttgttacattccctattggacgctgggtagatcgctgggatttcttctagncatccttcctacttgtgctggttaaactttcgtcaacttgacccaagtcaggttcatctgggaagagaggaccttaactgagaaaaagcttccattggatttgttctgcaggcaagtctgcagggtcatgttttgactaaaacattgatgtgagagagactagcccaccaggaaggggtcacccctgagcaagctggcccttccagcttagaaaacaggctgagcaagccagggcggagcaagtcagtaagcagcattcctccatgtctcctgtgtcactttctgccttgacttgcctcagtgatgcagtgtgatccgagatgtataaaccacatgaatctccnggtgctttgctagngttgttatcacagcaatagaaagcaaatcanagccaggcatggtggcacacgcctttaatcccagcac

SEQ ID NO: 821 - DNA, 340 bp, Mus musculus
  misc_feature (1)...(340): n = A,T,C or G
acacaggaaagagagggaggagcctgcagtcatccttggcccctgagcgatgcccttcggtctgtttgaatccagtagcaacagaatggagcgatgtgaggtcaagtccctccgcctgtgttccaggangagcctntaangaaattactnccngccaccccggttaatnagaatgaagcagagtgatannaaaagtnncttgctnncaacctacanagaaattgntatntnttnctctcnnttaataataacaaataagtaaaggantaggaagagangttatggctgaagnanaccactntcatgaatggtcnctntccggtagctggaacccctaaga

SEQ ID NO: 822 - DNA, 103 bp, Mus musculus
  misc_feature (1)...(103): n = A,T,C or G
ttaaaaagaaagcacctgaccttgtggcagagagttcatnttgttctgttctacttaactagaagtncagaagatgaagaaaganggaaaaaaatattccaaa

SEQ ID NO: 823 - DNA, 230 bp, Mus musculus
  misc_feature (1)...(230): n = A,T,C or G
tgctttcacacagtgnaagagacacgtntgtgctgnccngatgactnagtggataaagatncncagatnccaacnnnngantgaccctgngttccnccctgnagccccacgtagtangagacaactgagagcctctgacttncaccatgcattgcactttgcagtaangtatgcaacacccgncccctacccaatgaagagaatgggattgaataaattaaataaattaa

SEQ ID NO: 824 - DNA, 288 bp, Mus musculus
gactgagactcgctgtgcttgcaaagaagatctgggtatttcaggagtagaactgctggctggtttcacacaaaggagtctgagagatggctctccagttaaacgcactggctgtttttccagaggtcccaggtttgagttttccagcacacacatggaggctcacaactctctataactctgactctaaggaatccgacaacctcttttggtctccaaaggcaccaggcacatatgtgatgcatagacatgaagaaccaatacacataaaaattaaaattaaaaaaa

SEQ ID NO: 825 - DNA, 116 bp, Mus musculus
  misc_feature (1)...(116): n = A,T,C or G
ttggttgggagtgccttgaagncacaatncattgggaggaaagctnggtngagaanttccatcagggccaactggnnaggacccttccncaaccgggncccgggggggggttcctt

SEQ ID NO: 826 - DNA, 242 bp, Mus musculus
  misc_feature (1)...(242): n = A,T,C or G
ggcgataggcaggatgnctcagcttgccacgtacacctgncaacccgantgnanaccctgagacctgtgatgaagagatgngactctttcagtctctgacctctacttgtcctttttgnctggtaggagctccgcncctgctatacctacacntgcatactgactcttccgtgtaatntttaaattatananatacgtnaaaatgntnnaaacgggctactaangcacaggatcttagccat

SEQ ID NO: 827 - DNA, 141 bp, Mus musculus
  misc_feature (1)...(141): n = A,T,C or G
caggtgttatggattccntatatcaacagcngaagggctangganangaanagatgtgacagganattacatgagctntctgtttttatcagaggaccnaccnaggggcctnacaaccgganacttgcagagggacggggc

SEQ ID NO: 828 - DNA, 376 bp, Mus musculus
  misc_feature (1)...(376): n = A,T,C or G
actgaggaactgtgtgtctgtgcaatgtgacatcatgagagagagcaatactgaacacaccaatgtgagacatgctggtgtcatgggctgtcgccggagaagtgtgacttcagaaatgtcacttcacaagtagtcaggctgtctgtagcctgtggggggaacgaaccacaccgaggtcacatttatgtaataaggaaatcagtgacccgaggcacaagggtcacgtctgtccttctatgacngtgtctcttgagcttgcaacacttctcagcagttggagctaagagggtggccttcctaaagatattttcaacatttctagnttggaaatgtctctcacaagccaaatactggattctggaattcaaaaaaaaaa

SEQ ID NO: 829 - DNA, 158 bp, Mus musculus
  misc_feature (1)...(158): n = A,T,C or G
attgctcctgtacctatgangcccagcttctgaagctttnatatggagncagccactanttttgagcnaatcagggngcgntctagacagactcatcactactgcagagggagaattcttgctgctgctgcattaggtatctaggacgtggacaccct

SEQ ID NO: 830 - DNA, 124 bp, Mus musculus
  misc_feature (1)...(124): n = A,T,C or G
gcctgcctctctgcccacagccaacccctgnaatttgtaattagaatgtcagagccagcganctccagntagntgaaatgcgttcagnnacctanagggggggtggtgagcacttaacctcagg

SEQ ID NO: 831 - DNA, 198 bp, Mus musculus
  misc_feature (1)...(198): n = A,T,C or G
ctgagacaagagttctgataaatacaattgcgtccatgaacgntaaaggatcttttggctgctcattatggagctcngtcnggcctggaactcagctcctttctcagccccctggaaacccagactcccggcgagttcntgcatcttttcaangtggnnnntgcnaaggggtatcgtgncgtgctagcccagcccccc

SEQ ID NO: 832 - DNA, 112 bp, Mus musculus
  misc_feature (1)...(112): n = A,T,C or G
tatcccaccggcaacttgaaaagcaagcactttatcnnctcctggtggctgccaanactttcacctaacctgtnctggacttttntcctaaanactaataaaattgtattgg

SEQ ID NO: 833 - DNA, 139 bp, Mus musculus
  misc_feature (1)...(139): n = A,T,C or G
gcacgcttactgagtacgatcactgtagttgtcttcagacactctcagaagaggacgtnngatcttgttacanataggtttgnagagccaccntgtgggtnggtgggatttggaactctggaccttcggaagagcagtc

SEQ ID NO: 834 - DNA, 120 bp, Mus musculus
  misc_feature (1)...(120): n = A,T,C or G
ttctggcacactagantcagaccataagnatcncattacgagaatgcncngaganncttncntgcanccaacacatgttgnaatgtttggcaatgtgaactcaggacctgtggatgagga

SEQ ID NO: 835 - DNA, 454 bp, Mus musculus
  misc_feature (1)...(454): n = A,T,C or G
gactgaggtgtacctgtgtgtgcctgcaggagtttatgtgtagcacatgaatgcaggtgccaaacagttgaaacccacctcatgaggacgctgggaacggaattcaggtcctcggcaagagcagttccattgagcagtccantgtggatcctggcctttcctnctgtgcaccacagtcggnctttgtgtcaagaaagattcatcttgtgtcacccactgatgtcacctgggtctgggtgtctttgggaagggactccacttgtgtgagcccacaaggatctgtganaatctactgggggtgatgggggcatggtgtttcatcacagcccctgnagagagcccagganaggccattggtgaaagagcagcccagttgcagcaagagactcccagcattttggagatgccagccgccatgagatgaccaccaaggacagnagtggccgtggcgcgg

SEQ ID NO: 836 - DNA, 295 bp, Mus musculus
  misc_feature (1)...(295): n = A,T,C or G
agagaattctagaacatnncggttgacggagaganaccctctncnnccccctnnnnanttntcttangctagnctgcgcctccggaaatgaaggcttgnannacncgctctcgccgttccttcctgntgttcgtgtgtggacaggcatncttgcttanaagcaatcgctgagatttcacctacaggannaccactgcggagttnctgnagttgcgggaggcaacccagaggagaagccggngaagcagcggggagcccatggctaaaggantgaancctggtctcctagccattg

SEQ ID NO: 837 - DNA, 379 bp, Mus musculus
  misc_feature (1)...(379): n = A,T,C or G
gactgaggaggaaacatagcatggttccaaatagagtcacaacgttancaagaagcagttcgcttcacgcaggggactgggaagctgtatctcttggaccctttccctgcacagtggcttacaaacaccagcaatagtttcactattaaggaacactccgggaactgtctctgtgcctgtgcacctcccttttctgaagcatcacagatcatttcctcggagactttcaagaagttatttcgagagttattaccgtgtgaatatggaaagctgtaaccaagacatcacaattgtaatgggagaaaccgagaattctaactgcctcttttacagtttctttgagacaatagattatcttttcagattttaaaaaaaaaaa

SEQ ID NO: 838 - DNA, 383 bp, Mus musculus
  misc_feature (1)...(383): n = A,T,C or G
cctgactgacttcattcaantatggaactataagcngannaaaatctntnctccccangntgcttttggncctatcacagctacagaaaagnactagaagtttccttcttcactcactcacnaacnnaaagangagcttngnctggcgtcntcattttcagtgagcaatagtcaatcaaatgctgctacggacctgggcctgtaaaactagcttaaaacaatattcatattgtgtggaaaactttttaaaccacaggaagaaactggattcatgacactaacttgttcatcctaaataagtacttttttttctcccaatgtcttaataaaggttatatttccccaaaaaagattaaatcctataaataccacaataaaaaaaa

SEQ ID NO: 839 - DNA, 255 bp, Mus musculus
  misc_feature (1)...(255): n = A,T,C or G
ccaccgcaccgcctaaggnttttgnanatgcaacancccagcttccgngncttcngcattttggaganggcttcataatgtgacaactgnnntgnacagcatccatagagagaagcactncatttagcaatactcntacatggcctcagttcctgcctccagatttctgccttgagttcctaccctgacttcccttggatgangaactacaagttggtaagataaaataanccctttctttcccaaaaaaaaaaa

SEQ ID NO: 840 - DNA, 125 bp, Mus musculus
  misc_feature (1)...(125): n = A,T,C or G
gtaatggaacgtggaatcacctgcctttantncnaccnctcaagatgcagaggcncanggatttctgtgagtnngaggccagcncaggccttccttagcaaagctgccaggacagccagagctac

SEQ ID NO: 841 - DNA, 135 bp, Mus musculus
  misc_feature (1)...(135): n = A,T,C or G
ctgagatcaacatgaccgccacgnntattctcccanactgcnaacacnagagnttgctttcctgangaggacnactatagcanaaggngactagctcgagncgacctcnactacngagcaccaactttgatttag

SEQ ID NO: 842 - DNA, 105 bp, Mus musculus
  misc_feature (1)...(105): n = A,T,C or G
aggccctacagtaggaacaatccagtggagctatactnctccatggcctcagttcctgcctccanatttctgccttgagggtcctaccctgacttccctggatga

SEQ ID NO: 843 - DNA, 112 bp, Mus musculus
  misc_feature (1)...(112): n = A,T,C or G
tactagatgcgcagganngagccgcnctgggttcggtaccccacagcncntnantttaactantagggngtgaaatgctcccngaanggaagaatagatcttccaaaaataa

SEQ ID NO: 844 - DNA, 388 bp, Mus musculus
  misc_feature (1)...(388): n = A,T,C or G
ctgaccgcctgtatanttacacatcatttgantaccatgtgcttggcccagagccttacttgncagcacctgatcaggaatacatatccatcaacttntggatccctccagcccttnctgctcctgaccaggctcttggtggcaagacaatgtgttgatagcaaggtcttcancaagccgtccactgaggtgnntgnttgaaatttgagatcacataaccctgagaggaanaagatntgggtctctggactgggggattctgtcagatcccangnttgtaccccttggccacnncnngaagcanaanatggntcatntatgccggagggggccctggggagggcctgaagatgtcanngctcataaaagctctgactacctaccattg

SEQ ID NO: 845 - DNA, 322 bp, Mus musculus
  misc_feature (1)...(322): n = A,T,C or G
cggcgtggagctgcctgctcattnagttctgncacggcncacctgctgtgaacctgaggagcacacacactgtcgcacnnttctactgnaccaagagattatncganagagaatcggnntccnctcccccttccttcataactggnagncaggaacaananaacttgagccttgntcacacatgngaagccagcacactacgacttggacaggctctgcccgtccttcctccaggtgaggggtggctctacaggcttggcttaaagtctgaagatgctgtgctgtgacaaatatatatgacccttgacctacaaaaaaaaaa

SEQ ID NO: 846 - DNA, 104 bp, Mus musculus
  misc_feature (1)...(104): n = A,T,C or G
tgagcacaggaatgcntgcgtgcatgctttgcatgctctgcatgttatgagtgtatgggagtatgcaccatggcatatggcggaggtcagaggacgactctgga

SEQ ID NO: 847 - DNA, 324 bp, Mus musculus
  misc_feature (1)...(324): n = A,T,C or G
ggaccttgcagaagaggatcatgatgagattcacngcgnnncgaggacttntgctnactgatgnaaaactcagtccctccaccccactaaactacantggaagcctgggcganatggtctncacgcattctctacgaanaggtcagcagtgacgggnctgtcagngggtgatcactgatccttctnggaagactcctagttagacctaaagacactagcacgaaacctcattccagagataggangagaggaaaggaacggtttggggacctctctcanctgccttttacttgagtgganatataacagtcctaaattcaccag

SEQ ID NO: 848 - DNA, 398 bp, Mus musculus
  misc_feature (1)...(398): n = A,T,C or G
ggctggaaccagcatttggccgtattccataactggagacagtcattcctccccgtgcctcagcattggacataactcaccagntctgtcactagganagangnnttgcatacaaggagngcntnancnttcatacagtctggntnctntgantganctgacanacanaatgcctacctgggataacctgaatgagcatggnngggtggncatagttccagtgtatttagcctaagctcgagncaggttggnacctagcngagctgaaacagacccaccagagagcactgttgggatggcanatccattcatcacccaacttaatatgggaggatgaagctcttaaaaccagccccacgagctcaccagcagagagtgaaaaagacacgggtgttctt

SEQ ID NO: 849 - DNA, 332 bp, Mus musculus
  misc_feature (1)...(332): n = A,T,C or G
ctctttatatggggctggtgagatggntcaatgggtnagaccaccngactgctntttcgaatgntcngagttcaaatgccancaaccacntggtgnctcacaaccatctcntaatgagatctgactccctcttntggagtgtcngtngactgnttcnntntncttacttgtaatgnatngatctttnatanctatgcaanncannctagtctggaactcaaaatcttcctgtccctgactcctcagtgctaggatgacaagnctgaaccatgctctgcgccaagaaagtnnnctttatgacatgngaataatacctccataaaggtgtgggg

SEQ ID NO: 850 - DNA, 528 bp, Mus musculus
  misc_feature (1)...(528): n = A,T,C or G
actgagatttgtgttcaagagtcagnctgtgacccactggcagtgcagcatctctattgctacaaagacccgttagttgccnggaaaccagaagagagtgaggtggtgtgagctgcagcagctgtgaagaagggcatgctgggaaacagaaagtagagctaagctgtgaggagagttgagtatcactacagcaagatcctcctgctgtgctcatggttgacacctgaccaccatgtccccagccctgacatcagcctttccagacttccacagactgatttcaaatgcccagcactgtggtggggaggctgggatgcatcgagaggatctgtaccaaacaggggtagtgggcatgggtggagttgggctccaaagcagacatccatggcagctgagccacaccatccttcctgaggcttcagaaagacactgtacatgggaactgctgcagcaccgtcgcactggcctgcaggggccacagtggnaggctgcaagtgcaagtncttggggtttcctcaaaatgcattt

SEQ ID NO: 851 - DNA, 170 bp, Mus musculus
  misc_feature (1)...(170): n = A,T,C or G
gggttttccaggaaggcaattgaatctcacctgcaccattcanagcctgaaaggctctgatgaggactcaagcaggagagatctcatcctgctcaccctgttctctccacaaatacatccaattcttcactagacaagccttcaataaatgtgtattaatcactttaata

SEQ ID NO: 852 - DNA, 462 bp, Mus musculus
  misc_feature (1)...(462): n = A,T,C or G
actgaggcgcggcaagaactgaaccagggangaagctttgctcantaggaagtgagctccaattctaaaatggggaagcactgcgttcctccagcgagacnatcctgagctganaaggagtgagaagcggactcggacgggtgggggcccctggaaacaacccacgtggccgccatgaagacatngcgaaatcaatggntggagcatctgcgctgtggcatactggattagattcctctctattccttccatgaggtgtccttacaaaaacaactaaggggttcgtttattctagctcacaacctcagactacactacagtccctggaggttccggtggcagaggcttccaagagctggtcacatgacaaccagaacaagtgtacccacgtacgcgtntcagcccagtctttactgtctggcgcccagcccaggaaactgggccgcccacattggaagggag

SEQ ID NO: 853 - DNA, 335 bp, Mus musculus
  misc_feature (1)...(335): n = A,T,C or G
gactgaggcgggaccngactntgangtacatactgggcatgggccntattactntntngacgaggnnnnctctattgtcacaganatttgcctgttctgcctcctgagtctgaaaccacaacacaacttctttatgtagcctcagatgtcctggaacttgctccatagaccaggctggcctcaaactcagagatctgtctgcctctgcctcctgagcgctgggactaaaggtgtacgacaccagcatctggccaagggtttttgtttgttagntttttaatactcnntgaattatngctnacaggcaacattcgcagcacttcatggaaaagact

SEQ ID NO: 854 - DNA, 422 bp, Mus musculus
cagtccatccttgagagaaccagggcaggagctcaaggcaggaaccaggaggcaggaactgaagcagagaccacagaggaatgctgcttactggcttgctaccctggcttggtaaactaccctgctgcttatgcaccccaggacgacttaccaaaggatggtaccattcacaaagggcagagccctcctacacaaattagccctcaggaaaatgccccaagatgtgcccacaagtctgtctaatggaggcaattcctcaattaagaatttctcagccgggcgtggtggcgcacgcctttaatcccagcactcgggaggcagagacaggtggatttctgagttccaggccagcctgatctacaaagtgagctccaggacagccagggctatacagagaaaccctgtctcgaaaaaacaaacaa

SEQ ID NO: 855 - DNA, 257 bp, Mus musculus
  misc_feature (1)...(257): n = A,T,C or G
agaagttgcatcgggatcacccgcactctgccgatggttgtgagccaccatgcggttgctgggatttgaactcaggacctttggaagagcantcggtgctgggatttaaaggcgtggaccactacatgcctggcatgaattcctgcagcaaactggaaccaggatcaccactgtcagccaaggctatgacaacttgaaattttcttccatctgggtgaaattattgatggtagtttgcctaaatcacaaaaaaaaaa

SEQ ID NO: 856 - DNA, 304 bp, Mus musculus
  misc_feature (1)...(304): n = A,T,C or G
gactgagagtctcgttngctggtatgattgcagaatcatttacttccagcactcangatgcagaggcaggcagagctgtgagtctgaggccatctttggtctacagagtgagttctaggacagctacacagagaaaccctgtcttgaaaaagaattggtggcccatgtctttaatccagcactcaggagacagaggtttcccttgaaccagagaatgacaggacttggttggtttaatttttcaaataaaattgtttaagtttgaaaagaaaaaattaaaagctaaaaagccaacaaaaaaaaa

SEQ ID NO: 857 - DNA, 267 bp, Mus musculus
  misc_feature (1)...(267): n = A,T,C or G
actgagatatatgtggtggcccagnngtcagaagagagccaccatgtgggtgccaggatctgaacctaggacctccacaagagcagccagcactctcaaccgctgagccatctcacagacttacactctgtagggangagacaagtgctgactggacagctctttgctgatgtctcgacgttgaaactgtggagccggcacctatgtattttcctgcccagggaattaaagtgcccgtcatcggctaatatttccagaaaaaaaaaa

SEQ ID NO: 858 - DNA, 258 bp, Mus musculus
gactgagtggaatgctttaagtgaggcttaatgggccatcctagtaggaatatggaagactttgttgctgagagtgacttgaactgtgctgacctggccgcaaaaggtttcagtgaagaagaatttcagtatgtggcctagaaactgtttttgttgctttttggtgaagaatgtggctgcttttttgcctttgtctgaggagtctatctgaggctaaggtaaagagatttttattaaatgcattgacaaaagaaaaaa

SEQ ID NO: 859 - DNA, 142 bp, Mus musculus
  misc_feature (1)...(142): n = A,T,C or G
aagttcagtatccacagacaaccccatgcgtagtactanacnancatcttgtatacaagatccagacttncctcntctggagtgtntanaagacagctacagtatacttacatataataaataaatcttttaaaaaaaaaaa

SEQ ID NO: 860 - DNA, 129 bp, Mus musculus
  misc_feature (1)...(129): n = A,T,C or G
tggtaatgcccggggaaggnagacaggatggacccncttccctccttnctaccacaggcacacangntactccaaaggcgaagncccccccantgctngagcccagngggggaaggaacagaaacatgg

SEQ ID NO: 861 - DNA, 113 bp, Mus musculus
  misc_feature (1)...(113): n = A,T,C or G
ttcagcaaggtaaaaaaagggggaatgtgaactcgtgcttactgntgttttaacactcgcacaattgtcctattaactcttcaaggacgtgnctnttcggactttcttcatct

SEQ ID NO: 862 - DNA, 289 bp, Mus musculus
  misc_feature (1)...(289): n = A,T,C or G
gactgaggtatgggaatgtgagtgcatgtgccttcagaggacagaggcaccgaattgctcatagctgaagttataagtgattntgcgctgcccagtgngggtgaaggtttctctgtgtagccctggctgccttggagctcactttgtagacanggcaggctttgaacttagtgatttacctgcctctgtctcccaagtggagcacttggaagattaaagaagggagattgtccaaaattcaaggctagcctgggtatgtaataaaaccctatcatcataacaaaaaaaa

SEQ ID NO: 863 - DNA, 151 bp, Mus musculus
gactgaggtgaacagaacaggcttcaggggaccagagggatctcagccaagccttgctcggtcgtctaagcattcctattgttcaggcatgatgctacccgtcggatctcctcttgggcttagtaaaggctgcttggtgaaaaaataaaaa

SEQ ID NO: 864 - DNA, 297 bp, Mus musculus
  misc_feature (1)...(297): n = A,T,C or G
gactgaggccttgattcaacaaganactactttcgccaccttaagcatctatctctgtctgagatcacagaaatggctggctcattctctagacaggctgggagctcctctctgttctaggcggcccacagatgaaagcctcgcaacttctgatgctgactgcccgccagcccacgcaccatcactctcaaagcggagcatagagctcagaggatgaagtcctgctgtgagcttggaacactcgcccccacgccacacagaatcgtactgccttttattaaatgaccaaacgcacaa

SEQ ID NO: 865 - DNA, 449 bp, Mus musculus
  misc_feature (1)...(449): n = A,T,C or G
gactgagccctaggcatgangtgcaaatattcctgtggtatgctgacttnctccttcaggaacgtcttccagagattgctaaggacacatganaggagcctagcatggctgttcgttgagaggcccaacaagcagctgactgagacagaagcagatacttacacccaaccaatggacagaagctggggtctctgtggttgaattaaggaaaggctggaagaagaggatgaccccataggaagaccagcagtctcaactaactcagacccctgagatctctcagatactgaaccaccaaccaggcagcatacaccagctgatgtgagccacctccccctgcccccatctcccaacacatacacagcagaggactgcctggtctgacctcaaggagaaaagatgcacctagcccttgagcgacttggggcttcagggaacggggaggtctg

SEQ ID NO: 866 - DNA, 137 bp, Mus musculus
  misc_feature (1)...(137): n = A,T,C or G
tgaatctggactctgctggtgtggagcagatctgtnatgtctccagcagagggcgcattctgcattcttcanaactcaagaagctcagagtgaggcananctnanaagcgtgggctacccttttgaagcaggagaga

SEQ ID NO: 867 - DNA, 365 bp, Mus musculus
  misc_feature (1)...(365): n = A,T,C or G
cctcctctttttctaaagaagaagaagaagaagaagaagaagaagaagaagaagaagaaganntgaaagaaagaantagagagagagaangaaagaaagaaagagngagagngagaccnnnngaaagaaagacagagagcncganagatngactgnccgnccgagngnncttttcttttctcgtcttantatcatgtataatctggctatttggggaggagaagntcccctgngncggggctccgacaaggatttctttttctngctagctggcanctcnttttatcttctcggtgggtggggncctgctctcctgtagccncctgtttttatttcaatancacccccactccttccttggaaaa

SEQ ID NO: 868 - DNA, 284 bp, Mus musculus
  misc_feature (1)...(284): n = A,T,C or G
cgtgtccgtgaaggtgtcagatatgtacattggtgtttgccagngtgtccgtgaaggtgtcagatcccctggaactggagttacagagagctgtgaactgccacagtgngtgctaggagttggacccaggtcctcccgaagatcagtcatctctctcccttacctacttcagcttctttcttgccactgtggctgccactttctgccatgaccccaccatgatggactcagaccctctggaaccataaaacaaagtaaaccctcttctcttttaaaaaaaaaaa

SEQ ID NO: 869 - DNA, 399 bp, Mus musculus
  misc_feature (1)...(399): n = A,T,C or G
gacgtctggggagctcctgcattaagtcagactgaggattttccgtcccctccgcaggctccctgtaccctgagcggtcagtacatgtgggcctgcctcacagncctgggttcaccagcctctggcttggcacagcttcaaggtcttctgcatgtgtgcctctcgctgcaggatgagccagagacccctctcctgccatttgtcatcagccatgggtggaagagtcaggcaggcgtggtcagactttttgtttgattgtttgtttttctgagacagggtttctctgtgtaccttggctgtcctggaactcactctgtagaccaggctgacctcgaacncagaaatnctcctgcctctgcctcccaagtgcagggattaaaggtgtgtgccaccaagcca

SEQ ID NO: 870 - DNA, 219 bp, Mus musculus
  misc_feature (1)...(219): n = A,T,C or G
gcccattcagcaacagcccagtacttgctccttgataatgaagggcttttgacctgggagacctccagaaagcagctcttctctggaagcagtaagaacacctgtaggagaagccaggctccaagtcttgccattgcctttccctatgatgagcctggtccaaaggtgcttatgantgaggggggccatcctcaangacctcaagtctgcttattaaat

SEQ ID NO: 871 - DNA, 308 bp, Mus musculus
gacgtctggggagctcctgcattaagtcagactgagaaccctttaaacgcttagctgcagcataccatcaggatctttaccaacaaaaccagccctggaacagctcaccaatactatttgagagaatttgttttgggaagttggtaagtctcaccaaactcgatgtctgcttgatacatttaaataaaacatgttcctttatcctttcataaaacataaactctggaaccaacaggaaatggcttcaaaatacaaatgactcaattcagatatctaaatattttaaatggaaaaaaaacacattataa

SEQ ID NO: 872 - DNA, 322 bp, Mus musculus
  misc_feature (1)...(322): n = A,T,C or G
ggaggctgagtatcatggganggtcaagannncagnntnnctcctattgtcaatcacnatctggnctntctatcgttggtcgcntgancnccanncannttttggtgnagtgcagangtcacacaccagcagcccaagtncctngnacacatttcactggtacgctttnttgttgcncttcacaaaggacaagggccacagcccccttnttgacacaagcccgttgtccaccgcactgccaccaccaccccaagcatagggccanangccacacagntcatcttgcattgccagcgctggacacgcctacccgcaccttggg

SEQ ID NO: 873 - DNA, 456 bp, Mus musculus
  misc_feature (1)...(456): n = A,T,C or G
gacgtctggggagctcctgcattaagtcagactgaggcagggctcgtgagccctcctccaggaccagtcactgacagaaagaggaaggcttggttggaatggcccaggtcagccagctccacacatggtttgcacatcctcatcatacgacccagaacaggccaccttattnagntcnanngtntcatnngatgngatttttttcctgttctgtntcttangnttctgctgggccaatgntgnctnaaaagcccntccttggngtttntttggggtagccagaagacaanggngtggcgactcactcgctccaccaggccctcancctggcccttctgctgnctncttgggctccagccacaccagaagcnctcctgcttcaggaccttgcacctggtnttgngagaaaaagctnttcagctgacttttatgagggcggtcacctcagtggatgtg

SEQ ID NO: 874 - DNA, 364 bp, Mus musculus
cagagaacccctgggtgatcttgaggagcagccgaaatgggaacagaaaacccgagtggacaaaacaaagactggtattatgtcgcctaaacttagcggctctgcattgtcaggatgacacagacagcacttgtgctcagaaaagaaacggatctaaaacggagaaaatgcccgccctccctccctccctccctgccacatgtggcccgaccacatggaattcctctcatccttacatcagccgttcctttttgtatttgatttatcatctcggtagccgctcagtcttcagcatatgttacagacttgcttgctactttaaaatcctcaaataaaataaactgtctttttaaagagaaaaaaa

SEQ ID NO: 875 - DNA, 437 bp, Mus musculus
  misc_feature (1)...(437): n = A,T,C or G
gactgagggggaatgaattcaggacttcacaaatactaggtccnantcaaggnaantgaanacctgcctacttctcttctgccnagctacaggcgtataggcattctttattcgaccaatcangagataactttggggacacgattacagagcatcatctggggtatgtgaggattcctgnacccttggaggntaccagacctttgggggcttggnattanccattttattttctnaccaacagaaccagaggnnagcagntaagagctggagagatgnttnnataaaanntcatatttgctgaggccagggaccccaacctttggtncccnagngccccncataggggaagaacaccgcncgncagnagctccagctncanagggtttngccancctcttttaagactccttgggcnncaacaaggggaaaaaata

SEQ ID NO: 876 - DNA, 200 bp, Mus musculus
  misc_feature (1)...(200): n = A,T,C or G
gactgaggctggcttccagcagaatgtcaatctctcttgctagagcatcccanagcttgggaatgcaggtatgtaaatgccaaagttggctaaaactctgtatgatcttttacataatgatcanatgttatctacttttccccattcctctggtagtaaaattgaactgatttatatattgtagcagaaaaaaatcaaaa

SEQ ID NO: 877 - DNA, 178 bp, Mus musculus
  misc_feature (1)...(178): n = A,T,C or G
tgtcctcccctctggcaattctgcctcctgnangctacgatnanccatgntcatcactggactggagagatgggtcngtggntaagagtactcgtnctgaattctaatcnctgcaacnacatggnaggctcacaccnatctntacagcatacngcagtactcatatacatttgaataa

SEQ ID NO: 878 - DNA, 381 bp, Mus musculus
  misc_feature (1)...(381): n = A,T,C or G
tgagagcctgggtgctttgctgtctgctatctgtagctcaggctgccaccagccggggacatgccatgcgcctgtcattgctcagcaccttctacccacgatccaaaagacactgctgctgctgtctgacccctgggtcacacaggacaaaaaccaggtccctctgtgagattcagaaaaaccagaatactgaaaacactactccctccatcttctttctggagggaagtggaggattgggctgcttccaaattatgctgtgccagaaaggtcttagacaaagatgtataaaatgtcgcnaannctcctatcactaagcaagctgttgcttggggggcttgnagagctggntnaaaaggttannaagcactagttggctct

SEQ ID NO: 879 - DNA, 170 bp, Mus musculus
  misc_feature (1)...(170): n = A,T,C or G
ccctccctggtaaacggaggccgcgganttcccggcttctacgcaaccccaaaaatgggcgggangnagaantgagaacaggcagnggagggntggncgggcacctttctgttngcncactggatgattgggaggggnaaatgganaaacgnccctttgacccacttggc

SEQ ID NO: 880 - DNA, 453 bp, Mus musculus
  misc_feature (1)...(453): n = A,T,C or G
gaacttgaggtccctttttgganccctcancnattcccagccctgggacactggggtccctagtcaagangacacagcccaaaggatgctaganggttgacagggattacagnattgggnttcctcnctacttcaccacccagttttgttgactggattntgcaatttngagggatgaaccngggacccaccannanacnaggaanggtcaaaaggactacccaagccnttnctccttaacctttctaaangctcaatggttacaaggggaagtaccaatggnggtggngtttccttgngncatttcttaccaataacccccggcccccaaccaancccnttttaaaccntttaccttggngccnntcntccnccnatgggccccaaggggaaannttngtnaacttnccacgntntaaaggtttacccccccccanggtacccggatggggt

SEQ ID NO: 881 - DNA, 161 bp, Mus musculus
  misc_feature (1)...(161): n = A,T,C or G
aaattactgtgttctctcagtatagaagannaacagtctntggcatgtggattgtaatatccctggggattctctantatannccttcatttctgaagaactccaacngnaananttnntgangacttttaaatgtaataaaatattcattaagcacacta

SEQ ID NO: 882 - DNA, 148 bp, Mus musculus
  misc_feature (1)...(148): n = A,T,C or G
gacccgaagaagttcagctgatgacacgtgactatagcactcctccagcagcccgttggtttcaccatcctgtgggnattttgaatttttgactctaaatgttaatgtatagcaatggtgttgagaagacagctgacacaaaaaaaaa

SEQ ID NO: 883 - DNA, 121 bp, Mus musculus
gaactgaggcttccagacgtagcacaacagacatcatgaaagaagaaccactcaggccttaaagctcagcacctcttgccaaaatgaaaacaaagacctaatccatagaatgaaaaaaaaa

SEQ ID NO: 884 - DNA, 136 bp, Mus musculus
  misc_feature (1)...(136): n = A,T,C or G
actgagggatccagcactgtattctgacctncctcggngccaggcacacatagcncatattgtacagngtgcatgcaagcgaacactcctgtgtataaaataagtagattgaaaaatatgaattctgggttcctgc

SEQ ID NO: 885 - DNA, 246 bp, Mus musculus
  misc_feature (1)...(246): n = A,T,C or G
gtgccaccatggaatcttgtccagtttcgtgagttcagtaagggcaggaagtgaatgggcgcttttggaaatggtcagtgcacngagataagaagggagtcgtgggaacctttcaaaggaagcctttctggaatgttcagattgcagggctgaaggtgacaaagtgtaccctctcatgcccccagcagggccnnggacctgtaaagcacagggtcanaggcatttcctctgcctcaagggacagac

SEQ ID NO: 886 - DNA, 195 bp, Mus musculus
  misc_feature (1)...(195): n = A,T,C or G
agcatgagataaaaggatnngactaaagtatgganggctgcagagatgattcatnggntgagctcagctcccagtgaccgaatcgnggctcataaaccacctgtaacaagatctgactccctcttctggagtgtctgaagatagctacagntgtacttacacataatanatgaatttatctttgggggaaaaaaa

SEQ ID NO: 887 - DNA, 367 bp, Mus musculus
gactgaggtggggtctttcagaagaagcgctgtgccaagatctcaagatcctactaaaagtttcctgaagtttgccgaaagcagccaacgattctgctgacgcgggaaagccgtcagaaagatgtgcaatagcaaacacaactgtggctttaaacactgtcccagcagccccatcatcggcaatgaaggtaatacttcggagccatcagggttccctctgctcgtccgtttccacccgtttctcaagctgagtcccctccagacaactataaacaagaacgtatgtgctgcgcagtcacgttaggacttcgagtttcaggtttatttggttttgttattttacttttgaagtacgaagaacttcttc

SEQ ID NO: 888 - DNA, 319 bp, Mus musculus
  misc_feature (1)...(319): n = A,T,C or G
ctgaggtgacatgcccttncttcctgntgtctccatactcctccactgcaaagagagagnggactgatagnccactctngggnctgnnttnttgctttaaccnaangcngnangacacagtatgttccacaacttccttcacctttgcacagattagcatacacataanacantgaaggtagaactctcaccaatggnaagagacattgtcaccanctacntcancatcagggataaaagatgggcgccatatggacttgatgngcttgctactctgntttgggacactgnatttgcaaaaaaagaattgctgcgacaa

SEQ ID NO: 889 - DNA, 498 bp, Mus musculus
  misc_feature (1)...(498): n = A,T,C or G
gtacctcctttgtagccctgaccatcatggaatttacacaaggngatcaggcngccctccaactcacatnagatntgcntgnccctgcctgctgggatcaaaggcatgcacagccattgctgggccttcaaagnacttctaatcacatggntcctaagtgttcggcttcagatcccntgcagaggacaggncatgatctaatcaaacttgttgtcccagattccggttgtgtgggatgtnacaggtgattnttggccttaagaacagcagntnctccngtctctaancgcccaccggaatccatttggaggtctggaacatttcctgnaaaaagatgcccngaacttagtgnggtggcacgngnctttgccctcagnactgggangncttagntgaattgntgctagttggagtctanccttgntncaaggaacannaccccatttattcctcctctnnctcctcctcctactngctggtgatcttccattttgggat

SEQ ID NO: 890 - DNA, 205 bp, Mus musculus
  misc_feature (1)...(205): n = A,T,C or G
aaaatgcatgatttacccacggcaacagntttgctttgacggtctanangctctccattagccatcactcacgnngcacaaggaggaggggngtgancagtgcgccctttattgaacgaaggatgagctcngtcatcatcntatatggtcgnccctgagggacnantgacaaaaaacaatgacggctacatcgaccacctgagct

SEQ ID NO: 891 - DNA, 747 bp, Mus musculus
  misc_feature (1)...(747): n = A,T,C or G
gacgtctggggagctcctgcattaagtcagactgaggngcttgtgtngccnannactganctcatactntntgnctccanggctgnnanttgaactctncatgctctntctnntagatgctnggatnacaggtnaccnttggnacatcggggantgtatgnncnataaccgggtaancngganangtgacangaatgaantnactgnnactnnnaanaggcntaaacgggacnnnnntcccnncatgnnnattaanggttatactggggcatggnactctgaattctatgaggctggccnngaagatcctcnatcctttgcagagttggngccaagtggacttccaaagctagccagatggcccagcatgtgctgtgcctccctcgncattggggctactcttggtgacctgacagatagggcaggagattctctggcagggtcgggaggttttgttcaaagccctgatcgatttgatgtcactactgagagctgctgaataatgnantctcaggggcattttacaaatcccattcactgcacgcagaatagccacggaccaaaagcctggaacctgggcattaccctgcacacgttcccccaggagctctgcctggacattgatttnnnattngtgaaatgaganattantcccattggaatgcagccaatattggctcgnggaaggaacttcngcctgccttccttgaagaacctntaagggccatggtttggtgccctgggtgc

SEQ ID NO: 892 - DNA, 361 bp, Mus musculus
  misc_feature (1)...(361): n = A,T,C or G
gacgtctggggagctcctgcattaagtcagactgagggattngatgcatggncaggangnntagcatcacccacctacctatgtcgtgatgnnttgctccttanatacacnttgtctgaggccacactncttgnagagtcacngcanaggacaaggacnnnntatgcctatataacagaaggctgccttngagacatntagctccnacntngaannctgttactgggccggaaactcagcactctacctganacncganacaaagctctcagtctatttgtacntgggncaccttgagatnatacttnntgaatccgnctaggtggacgnggcgaacgtgaccctggcggcgacagcgata

SEQ ID NO: 893 - DNA, 377 bp, Mus musculus
gccaagagagagaccctgagcatggcatggacttttgaaacgtcaaagtccatctccagtgacacatgtctccaccaaggcaactcctaatccttctgtgatggtttgtagatgctcggccgagggaatggcattttagaaggtgtggccttgttggagtaggtgtgtcactgtggatgtgggctttaagacccacatcctagttgcctggaagccagtactctgctagcagccttcagatgaagatgtagaactctcagctctgcctgcatcatgtctacctagatgctgctgtgctcccacctggatgataatgggactgaatctctgaacctgtaagccagccccaattaaatgttgtcctttataagactaaa

SEQ ID NO: 894 - DNA, 377 bp, Mus musculus
  misc_feature (1)...(377): n = A,T,C or G
gacgtctggggagctcctgcattaagtcagactgaggatgagaaaatcaagcacaacagggtttcacgtcttacacaaggtcacctgccctgaggtgcaagagccaagacagaatgcaaganccccganntgnttagccantcaatctgangagacnctctnaangaccanggagaccacgattcnnatgcanacngcnggaggctttattgagaacaccggntncccgnncganncagtntatcngangactggcgcacncgagtgtgnagtttttaccctttttatagggntggggctggggagcaaaaagcgcggttacagaagcnagaatcngagctggttggttagttcaaataaggcttggggtatttcct

SEQ ID NO: 895 - DNA, 483 bp, Mus musculus
  misc_feature (1)...(483): n = A,T,C or G
acactgacattgcccgctgccacccatggacagatgtggaccaccncacagngncatttctgaagcagtgatgaagacaggncatgaactnaggtctgcccatcctcanaccacngggcctgtagtcaccanntacacacagncgccntgctccctntccagtnccaantncctggaggcttcctnccctttacccaaatgcaaacttcgggcttcacatcagggtgggagtaaagaggaccctcctactcaggntcgattcccaccatggggaccagcatacaccagccctggactttccgtctttttntcctctgtctncccgagtctttttaaccaggggtcctgagttcaattcccagcanccacatggngatttacaatnatgtgnantgggatctgatgccctcttctggtgagtctgangagagtgacagtgnactcacatatataaaataaatatatngacctttagaaacagcc

SEQ ID NO: 896 - DNA, 265 bp, Mus musculus
  misc_feature (1)...(265): n = A,T,C or G
gacgtctggggagctcctgcattaagtcagactgaggctagtttggagaagctgaaccaggaagctgaacaaacatacctacctgatnttngagctatacctattaaaggcaactagaacccacagccttgctctgtaggatacagaaaagactgtgttacaccaagaatcagcaaaatcacaaggagaaggagaaacagtctgtagatagtaatgacaaagtaaatangagaagaagaagangangaagaagaactaagaagaa

SEQ ID NO: 897 - DNA, 275 bp, Mus musculus
ctattgacaaatgccaaccaacctccctaaatgaccaactaccacccacaccccttctcagggccctagtatttaaaataacctccaggggctggtgagatggctcagcgggtaagagcacccgactgttcttctgaaggtcctgagttcaattcccagcaaccacatggtggctcacaaccatccctaacaagatctggcgccctcttctggagtgtctgaagacagctacagtgtacttacatataataaataaacctttaaaaaataaaata

SEQ ID NO: 898 - DNA, 189 bp, Mus musculus
  misc_feature (1)...(189): n = A,T,C or G
aactctcagcttccatgtntgnctgcttgctgacatgcttnactcagtgaggataatggattaaatctccgaaantgnctacaagatggtccaagaagatgctattgnttgaagagacgaagnctatgtctgtancanatttgtgcacactcttcagncngganttaattangatcctttggaactgga

SEQ ID NO: 899 - DNA, 156 bp, Mus musculus
tgtgtttactaccaaggcgtgaaagtggtcaccatatagagcacagcacccactgcactccagcatgaagctttcatctatgaagttcacgcttgagcaccacactatgaaaatacaaacaaaacatgcaaaagaaacctcatgataaaaaaaaaa

SEQ ID NO: 900 - DNA, 191 bp, Mus musculus
  misc_feature (1)...(191): n = A,T,C or G
acactgaggctgcgggntcaaccagaccgtacanggtagaacataggngccgnannatngtctgactgacngnngnccaccttgccgctctgctcaanggaggttcaccacctgactnccctgaagcttgtctctgctacactgctnacctncttgatcctaantatttcattngtttgtttgcttggtta

SEQ ID NO: 901 - DNA, 462 bp, Mus musculus
  misc_feature (1)...(462): n = A,T,C or G
tgaggtttaggatcaattcaattgtcaagtgaagtggcaagtacgtttaccaccatggagccatcactgtcctcagcangntgacatggatatgaccctgtcaaaggtaccattgttagttagcagaggcctctctgggtcaggctccagaattgataaagccttcctttggatatgttcaagtgttgccagtgtgtacagaaagcagctttctcccatagggctagctatggaatcangcacagtaggctgggcctgcctacctcaattagctcttaagaaaatgtctggggctggtgagatggctcagtgggtaagagcacccgactgctcttccgaaggtctgaagttcaaatcccagcaaccacatggtggctcacaaccatctgtaacaagatctgacgccctcttctggagtgtctgaagacagctacagtgtacttacatataataaataaaaaa

SEQ ID NO: 902 - DNA, 100 bp, Mus musculus
  misc_feature (1)...(100): n = A,T,C or G
ctacctgcttaagtcagactgaggntccaagagcagagctttggagccaacgctgccgcctcttttgggttttgacggattatcacggggaggtagtgag

SEQ ID NO: 903 - DNA, 265 bp, Mus musculus
cctgcattaagtcagactgaggtgtttcgtctgcatgtaaggctgggaaaggctagaaaactgtgtcgaatcccatggaactggaactatagacagttgtgaaccaccatgtggttgctggtaattggacctgggtcctctggaggagccagcaatgctcttagccactgagccatctctgcagtcccttatctgagcctttaatcccttcttccagcatccttagtggcatttatgtctaaatatgagctttcaatttcccata

SEQ ID NO: 904 - DNA, 456 bp, Mus musculus
  misc_feature (1)...(456): n = A,T,C or G
gcaagtggtcctgggttctataaacaagcnggctgagcaagccatgggagcaggcggcactttntaaagatgaccganctaccataacaaccacaggagaacaggattttgagctgacagnncttccccnacctgctantgatgcctggccagtgtcttctancttncctagggcntccaaggactctctttgagtattttctatnaactnagcgggtggctccagnccccancagccnctatagacccatacngaanaatacctgcagagcctgnananatccccctcaatgggnccntttgacgcgnccttgctgtnnggggtnacagggcancncagcttnagtggcacagctgaaatagantgagtaacacaggcangcatgtttcctgngaaacacagaactgnaaactgtgtcaaaggtganacccgctctgtttctaccaggagaaaaa

SEQ ID NO: 905 - DNA, 166 bp, Mus musculus
  misc_feature (1)...(166): n = A,T,C or G
cagattgaactcaggntctcagtgcttggnagtgcctatccttagnaactganccctctccccatactgctccctgccctaaaacatcatccanacaagacctctggggtgccacccnctgnaacatgggtaacctaccagcttcccccccccccccaaaaaaata

SEQ ID NO: 906 - DNA, 105 bp, Mus musculus
  misc_feature (1)...(105): n = A,T,C or G
tctggggagctcctgcattaagtcagactgagcacgaagancagctgaggttgngggctcacccatggctgagtaataangggaggagcaagaagttccgcctct

SEQ ID NO: 907 - DNA, 379 bp, Mus musculus
  misc_feature (1)...(379): n = A,T,C or G
gacccacatggtgaaaggagaaaagtgaccccacgaanaaatctatgacctccacatgcacacatgtgcacatactcacatactaanggaagaaaggaagaaaggaggaaaggaagaanggangataggaggaaaggaatgaaaggaagaanggaggganaggaanantggnntaatggatgaaagggaggaacagnaanaattgngngcctngctnaatagactgaaagaaagaacaganngatggntngttttgntcattacttctgtaaggcacactttcagtgacccgnagattcatttancatatttaattgggngntaagttnaccanttattttgacttaatttnaataaaatgctttagacgtacttgcat

SEQ ID NO: 908 - DNA, 251 bp, Mus musculus
  misc_feature (1)...(251): n = A,T,C or G
gggttctgttcttcgattggnctgngaagcctgaccccccaatcttctacctgaggaatgtcacataatccttggtgaaatgacaagttcaaccttcctggaatgnctcttcatgcnaacggangggatccccaagaactttaagcttcagcnctatganagcttnaccctangaaccacccctttccacttctctaaggttcaaggtctttgattcaccccaataaagtgcatgctcataaaagaaaaaa

SEQ ID NO: 909 - DNA, 218 bp, Mus musculus
  misc_feature (1)...(218): n = A,T,C or G
agtcatcatcatcattgtcgtcgtnatcgtcgtcattgncatcatctnnnntgagagcggagtganagaggggaggtctctctatttagcactggctgtcctgnaactctctatgcagacctgcagatcagactgggcctttganctcacagagattccggnnggcctcttgcctcctgagtgctggggattcaaagnngttcacctgaacaccaggt

SEQ ID NO: 910 - DNA, 119 bp, Mus musculus
  misc_feature (1)...(119): n = A,T,C or G
gctcctgactccaganctcctgccttgtgtgagtatccggtcctgccttggtttggtcgatgaacagnaatgcggaaagtgnaagctgaataaacatccttccttcccaaaaagaaaaa

SEQ ID NO: 911 - DNA, 113 bp, Mus musculus
  misc_feature (1)...(113): n = A,T,C or G
cttcctggggacctcctgcattaagtcagtatctgaggtcttaccccncgncngacttngagnnnacgncaaccgaganagagtttangattctttgcgtgatgactgtgatc

SEQ ID NO: 912 - DNA, 217 bp, Mus musculus
  misc_feature (1)...(217): n = A,T,C or G
ggggtctttcaccatgaactttcaacgactngtctggctaaacangacctgaacaaggacaccaccaaccaagggacatgcatngagagaaatancagagagccctaccctagacaangagttcataancactaaggaatgttgangagcaccctcacatatcaagnggncngncctgantcatatncatacaaattgancagattgtgtgtgtgtg

SEQ ID NO: 913 - DNA, 148 bp, Mus musculus
  misc_feature (1)...(148): n = A,T,C or G
agaatgtcctctggtcgaaaccaggttgatcntggaccatcatcagcctccctggctatggagtntgncacagaangaccgaagtgccatgctganggtcctcacgnaagtcagggttaagagcttgaacagacttggagggagctgt

SEQ ID NO: 914 - DNA, 151 bp, Mus musculus
  misc_feature (1)...(151): n = A,T,C or G
gtctcccccacccacattgggatncccctgtttccagacttcactttnngccttctttgcctggataccctggagggaagaagtgaanaatgggaacaacagataaggtaacagaaccagcanctcaagataacttactttgagggaaggt

SEQ ID NO: 915 - DNA, 388 bp, Mus musculus
  misc_feature (1)...(388): n = A,T,C or G
catcatcatcattgtcgtcgtcatcgtcgtcattgtcatcatctttgtgagagcgagtgagagagaggaggtctctctatttagcactggctgtcctggaactctctatgcngacctgcagatcanactggccttgagctcacagagattcgggcggcctctgcctnctgagtgctgggatcaaagngcncactctgacncccagntacctccaccatactgnccaagtcccagccaggaccgcnaacaagaatcaaagntggtgtgccnnnaagcgccagaggaaagggttagagtcatatctacctnttgctcccagaanagaggtncgcccnagggttnngccannccngaaaanggtgatgataaangaagccgagagcactac

SEQ ID NO: 916 - DNA, 219 bp, Mus musculus
  misc_feature (1)...(219): n = A,T,C or G
gtctggaaacatccacagtatgacgggatactgagtccaacccaaggcctcctgcttctgtggatgcagcagcccacttgcaggggcctcctggatctgcgcaggcagagttccgggacttggagactaactgagccccatgctggtcgggctttgctgaatcccagacctggtgcttngtgccccggatgctctcgcccatnggctctggctccaccg

SEQ ID NO: 917 - DNA, 289 bp, Mus musculus
  misc_feature (1)...(289): n = A,T,C or G
ggggagctcctgcattaggnnagactgaggtcagccangacgacatgaggacccaggttcagttcccggcactgacatcaggttgatcacaagtacatgtaactcttgcttntgaggattcgacatnttcngncctccacgggtcacctttnctggttcctgtttgnggttgaaggtgcgatctctcaacttcctgctctggntatccgctgcccatacctcacctgccacaactgactctctnnctcngaaactgtaagcctaaggaaactcttccataagcagctgt

SEQ ID NO: 918 - DNA, 109 bp, Mus musculus
  misc_feature (1)...(109): n = A,T,C or G
gtaagatcaaagacaaaattaaagagaaagacaaagagagagagaanaaggangcctnnggtantgagctntatcaagaaagagattggagatgtaaggattttactga

SEQ ID NO: 919 - DNA, 315 bp, Mus musculus
gacgtctggggagctcctgcattaagtcagactgagacacaccagaagggggcatcggatctcactacagatgattgtgagccaccatgtggttgctgggaactgaattcaagctcccggatgtacagtagctgctcttaactgacaagccatctttcctgttcccttgtttgggcttttgagatacgatttttctatgtagccctggctgtcctggagctcactttgtagaccaggctggcctagaactcagtgatgcaccagtctctgacccccaagttctgggactaaaggcctgtgccaccaaaaaaaaaa

SEQ ID NO: 920 - DNA, 182 bp, Mus musculus
  misc_feature (1)...(182): n = A,T,C or G
atgacttgtttgactaatangncctgaacanggacgccttcntccaggggacatgcaaggagagaantagngtnntagccntaaccctanacatnnngttcataaaactncgggaatgcttgaatagcacccctcacatancaagtggtcngnacctgaantcataaacatacaattcgagc

SEQ ID NO: 921 - DNA, 395 bp, Mus musculus
  misc_feature (1)...(395): n = A,T,C or G
gcatctacatggccatgcnnttntggntgctttnacncagacnctnagnaccctgacatgagcttgtctgaaagattgcttgggacgcaccacaccaaaatcacagggatgctaagaatcagtagtgtcgcgagcagtanctgtgggaaatacttggcttacnntaaanggtgggggcctcnntccgnatagagcaagaacaagatgcctcaaagaacgtgtgatttnacactctgcgcgctctgactggtctggcaactgctggccatgcacacaaaanagggtngagaactgaagtgctcngannnncacctgctctacatgccccgcaaggctgatgcacacttctgaataaatancatgagggacctnacagcttgcacgcactatataaa

SEQ ID NO: 922 - DNA, 466 bp, Mus musculus
ggtttcatcatgtccaggatgaccgagaactcactatgtaggtgacagtgaccttgaacttctgatcttccagctttcacttccaaaatgctggagcatggacaagcaccaccctgcctgatttctaagatctgtttatcagcacaagtgttttgcctgagcatatgtatgtctgtgcaccatatgcatgtctggtgtcctcggcagtcaagagcagatatcggatcctctggaattgtgaaccaccatatgggtgctgggaaccgaagtgaggtcctctgcaagagcaacaagtgtccttaaccactgagcctcctctcctgcctctcacacatgggatctcacttgagtgcaagggggagactaagggaacggcaacatgggtacacaggatccagctgaaaaacctgaacacacacaaggcgccgcaggacttcacagagggagcctgtaatctcttgggggc

SEQ ID NO: 923 - DNA, 400 bp, Mus musculus
  misc_feature (1)...(400): n = A,T,C or G
agtctgggttgctacccgcttaatncagaantgacttgtnaggngcgcntcnnggcggcntngccgctgganncggcctactcanntgggacntatncnnnntncncctnatcttaaaggaggnganaactntccnaccttnttgagcaacgttcagcctggttaagtccaagctgaattggccaattcttttgctttttaccctggaagaaatactcataagccacctctgttatttacccccaatcttcacaagaaaaactgtaaagnactggcggactaactttngcaanaccagnaattattcttggcggcccancaacccggnctttnangcaaaggaaaccaaaggaaaagccttgntaagtngtggaattgaattggggccacccttggaacc

SEQ ID NO: 924 - DNA, 178 bp, Mus musculus
  misc_feature (1)...(178): n = A,T,C or G
accttttgagcaagttcagcctggttaagtccaagctgaattggccaattcttttgctttttaccctggaagaaatactcataagccacctctgttatttacccccaatcttcacaagaaaaaacngtaagccccgttcagtactaggcnactannnacgtacacaaaaatgttctgg

SEQ ID NO: 925 - DNA, 337 bp, Mus musculus
  misc_feature (1)...(337): n = A,T,C or G
gaaaattatgctgattgactggaaatgaagccaggagacagctccaaggccagggacactggtctccacggccccttcctcctaagtcaagctgtctgcactggcctcgatctgtggaaagggctgctggagttcgttggctgtttgcataatttcctctgccttctcgggtcacatacaaggatgccacatgaggaagatgtagaaccctcagctctgcctgcaccatgcctgcctggatgctgccacgctcctgtcttgatgataatggactgaacctctgaacctgtaagccagccccaaattaaagggtgnccttnnaaaagttttcccttgt

SEQ ID NO: 926 - DNA, 161 bp, Mus musculus
gatacaagtttgattcccagaaaccacatctgatgaaaccacaaccagctataactccagttccagggaattctgcactctcttggtactcataagcacccatgctctgtgcatatacctgccatatacacagaaataaatcttttttaacataaaaaaaa

SEQ ID NO: 927 - DNA, 164 bp, Mus musculus
gatacaagtttgattcccagaaaccacatctgatgaaaccacaaccagctataactccagttccagggaattctgcactctcttggtactcataagcacccatgctctgtgcatatacctgccatatacacagaaataaatcttttttaacataaagaaaaaaa

SEQ ID NO: 928 - DNA, 161 bp, Mus musculus; identical to SEQ ID NO: 926

SEQ ID NO: 929 - DNA, 160 bp, Mus musculus
ggtccacgaagcatcaaggaggagggacagaaagactgcaggagcaggaagatggatggagtgctgtgaaacactcactgtcttttggatttgacatagctgttgtaatcgtgaacatatcaaaattataggtagctacacaaaaacccaaaaaaaaaaa

SEQ ID NO: 930 - DNA, 161 bp, Mus musculus; identical to SEQ ID NO: 926

SEQ ID NO: 931 - DNA, 397 bp, Mus musculus
  misc_feature (1)...(397): n = A,T,C or G
gaggcccctgcattaactcacgnacnggggngaagagccacncacagaatgtctngtggtnttccagccgaggatggncatttaaanggngcgcnggnntcaaattctggcgaggncgcgccatttaaatggccagccgaggncannnnagctngnnctnatccangctgaactggctnanaangaggnaactaccnnccttttgagcaagttcagcctggttaagtccaagctgaattggcctcgctggccatttaaatggcgcgccctcgaggaattcggatccggcgcgccatttaaatggccgctatggccaattcttttgctttttaccctggaagaaatactcataagccacctctgttatttacccccaatcttcacaagaaaaactgta

SEQ ID NO: 932 - DNA, 161 bp, Mus musculus
gatacaagtttgattcccagaaaccacatctgatgaaaccacaaccagctataactccagttccagggaattctgcactctcttggtactcataagcacccatgctctgtgcatatacccgccatatacacagaaataaatcttttttaacataaaaaaaa

SEQ ID NO: 933 - DNA, 161 bp, Mus musculus; identical to SEQ ID NO: 926

SEQ ID NO: 934 - DNA, 161 bp, Mus musculus
gatacaagtgtgattcccagaaaccacatctgatgaaaccacaaccagctataactccagttccagggaattctgcactctcttggtactcataagcacccatgctctgtgcatatacctgccatatacacagaaataaatcttttttaacataaaaaaaa

SEQ ID NO: 935 - DNA, 103 bp, Mus musculus
atgtgagcgctgttcctgccaccatgcctctggcacaccttcatggactctgaccccctggaactggaagcctaattaaacctttttttttataaaaaaaaaa

SEQ ID NO: 936 - DNA, 104 bp, Mus musculus
atgtgagcgctgttcctgccaccatgcctctggcacaccttcatggactctgaccccctggaactggaagcctaattaaacctttttttttataataaaaaaaa

SEQ ID NO: 937 - DNA, 408 bp, Mus musculus
  misc_feature (1)...(408): n = A,T,C or G
gaatctgaagtcacaggtcttcgtgtgctttatgcagcaagcctccctccagctcctcaattgcttttaaacttgaaggagatgcatgaaagatagagatgcgataaacacgggtcgtcagcatggagcagagaccagggttctttatgtcaggctttctgaaacttctcccattgttacttcatttcacctgagaaatgtttatgccaccaaattttcataggcatgtaaaacaagcatacaaaataaatgtttgcaggtaataattataaagatatttactgtaaagcagttctgtagtatacatataatgnaccatttactaaagatgaaagcaaatttgcatactaagatgaataagtanttatttttatataaataagccttggctgatttaaaaataaaaaa

SEQ ID NO: 938 - DNA, 450 bp, Mus musculus
  misc_feature (1)...(450): n = A,T,C or G
gagatttgggaaacggataagaggtggacgaagagaagcaaagcatctgttttgggctctggcttccggaagattctacagcaagttggccctcgctgctgtgcagcagcctcagcggcgccgtcctctgtggattcctgcaaacactccctacagggcaagctcatctatccatgtgcttagaggctcagagcagaactcgcctgcaggaggccgcctcgagagacaagtagatttacggcccaaagtgtgcctgctggagtttccggccaccttcacagcctctttctgcccatggagatgccaactcaacttccagacctcattcctctgacctggactctgtgagcagcaagcgactgactgagcgtgcaacgtggttacagccaaacacagagagtcggngggcaaatgcaggaacaacgcatcagccaggcgcagtggaaaaaa

SEQ ID NO: 939 - DNA, 105 bp, Mus musculus
gatgtgagcgctgttcctgccaccatgcctctggcacaccttcatggactctgaccccctggaactggaagcctaattaaacctttttttttataataaaaaaaa

SEQ ID NO: 940 - DNA, 120 bp, Mus musculus
atttagaacggaacacactgccctgcgcatagacagatgctctgcttctgggttacccaccagccctgaaatgctccttttattataaacctattctgttggtctatggaaaaaaaaaaa

SEQ ID NO: 941 - DNA, 104 bp, Mus musculus; identical to SEQ ID NO: 936

SEQ ID NO: 942 - DNA, 435 bp, Mus musculus
gttccatcacctcaatattgagctgaagccacactgtgagcttgtgaggcgacatgaggacctccgccccaatggctcagctgggtcctgcatggaagacctggggtgtaagtgagtggagccttggccgggtcctttgttttccctgttcctgtgcactcttccctccccttgctgtatcttccaacatccaccgaggctcggaatccacccacccctgtgtgagtgcccgcgggtgataagtgtcttcccagggcgtcttcgaggttttccttgtctttataacagttggctgggtggcttactacagtggcactgatttcccaggattctacatggtgggaagttcaagattcctgtgccagcacctcatgttctgggaggactcttgctacccccatcagggagagggtgcttggctgtggggtcttgtct

SEQ ID NO: 943 - DNA, 102 bp, Mus musculus
atgtgagcgctgttcctgccaccatgcctctggcacaccttcatggactctgaccccctggaactggaagcctaattaaaccttttttttataaaaaaaaaa

SEQ ID NO: 944 - DNA, 780 bp, Mus musculus
  misc_feature (1)...(780): n = A,T,C or G
ttactcggggggggaagtcntaaaccctcggcaaancntgggngggggccagggnnttcaantaaanggggcanccccctttnttagngcaaaaagcattggttanttgannccccnttttnaccttttcggaaggggaagcngnccccnttggccttttgcttggaactttttcttcttggcncttcttggnggctttttcccttggggggaanaaggggtggggtnggatcaaatttncccccttcncnaaaccccttggnagtngnttgngccaagggtaaccaccttgcnttgggcccacccaagccaaggatggcccccattggaaaaggaatggccttgaaccaaattggaaaagaatggccttgggccccttggtggcctttggggtttctttggccttaaaaaatcaaagcccttggggtccggggaaggggaaaccaaggggaaggaaaagggtgggggtttcaattggggaagggcccccgtnggttttggaaaaaggggaccttcccaaccccttttttccaagggcnttgccccttcttacaacccttcaaanggttcaacntttgccttgtggttgggtgggggggggtcccttcaaattttggaccccccaacaagttggggggtngccttggnaccaagcctttgccccccaacttggcaaaaaaaaaacccggnaaattccttggccaggggtgggaanccttttggggggggaaaaaaccaaccaaaacccttaaccggggcaaaaaccaaggagggaacctt

SEQ ID NO: 945 - DNA, 100 bp, Mus musculus
gagcgctgttcctgccaccatgcctctggcacaccttcatggactctgaccccctggaactggaagcctaattaaacctttttttttataataaaaaaaa

SEQ ID NO: 946 - DNA, 103 bp, Mus musculus; identical to SEQ ID NO: 935

SEQ ID NO: 947 - DNA, 110 bp, Mus musculus
  misc_feature (1)...(110): n = A,T,C or G
gggccaggggggcccattaactttgggcttanncnggccgacnntgctcnnnggggggngaccaccnaggccagggctacacggaggtaccctgcctttaaaaaaaaaaa

SEQ ID NO: 948 - DNA, 102 bp, Mus musculus; identical to SEQ ID NO: 943

SEQ ID NO: 949 - DNA, 184 bp, Mus musculus
  misc_feature (1)...(184): n = A,T,C or G
gatcaagacaggacagcctcttaaagtctgaggctgttcaggagcntcccatggctccagcnctgngcgcacactaggnccnttaatnnggncntttttccncaagaagggggcgcttgctttccctgagaggnggatcccatttccttgntccaaaacattggaatgcttggataagttgcct

SEQ ID NO: 950 - DNA, 535 bp, Mus musculus
  misc_feature (1)...(535): n = A,T,C or G
atttgctaaaagcccaggacagtgtgaactcaccgaggaggtagtattaacagatggcagggcagaatccagatctgcaatgacttctctcaacagtctgccactagagccgggattccctccgactgttcacccctccagacagggcagaagcatgatacacgcaacctctagcaaactctggcaggtgttcctcctaccagggctcttaccgccgcagtcacctcaggaaagaacaaggaagccttcatccctgcctccacactgcaactgctgcacatcaaagcaggtgccttttcccggctctggtaccaaaggctgacactgcccatcaaggcccccaaaccccacacaccctnacttntgccttcagggagtgngatagcccttcacccccacaacaccgagccttgagctgtcgtgagcaagtttaaaaagtgggggccganttncctctactaaggctggatggtcttctanggacatagtcaggatgggggagcaagggatctgggccttcacttaaaaaacggtg

SEQ ID NO: 951 - DNA, 137 bp, Mus musculus
  misc_feature (1)...(137): n = A,T,C or G
ggtttctctgtgtagccctggctgtcctgggaattcactctgtagaccaggctgacctcgaactcanaaatttcaccttgntgggctgggtgagaatggctcaatggggtaaagaagcaccccgactggcttttttc

SEQ ID NO: 952 - DNA, 444 bp, Mus musculus
  misc_feature (1)...(444): n = A,T,C or G
atgtaaccaagatgatcctgaaagattgaggaagactggaagtgagacccaaactcttctcctggctcctgctcttcaaagaggacaaaccttccacctttatctgtgaagaagagaaagggcgactctagcaaccctgttccttttagatacctaaagtgggaggaacctctgaggctggcagtaggatgagctctgccttagggaggagagggctcagggctcctgtagtccctgggccatgtcctccatcagctgcttccttcactgccactcaagggaagaaggaaggcatcatgttggctcactgttgaagaggggacacagtagcagcgtgtgaggtggtcaagttgtgtcagcagtcaggaagcagagagaggtgatcgctggtactcancttaacacatggaaagngctgcccacagggctggagagatggctcaa

SEQ ID NO: 953 - DNA, 395 bp, Mus musculus
ttgagacaaagtcagcaggtctggagagtgactgagatgtcccagggctctgccccgcaggcaggagatgcagccagcaaacctccagcttttcttttccaccttcaaaaactcccatagcaagcagggtttctctgtgtagccctggctgtcctggaattcactctgtagaccaggctgacctcgaactcagaaattcacctgttgggctggtgagatggctcagtgggtaagagcacccgactgctcttccgaaggtctggagttcaaatcccagcaaccacatggtggctcacaaccatccgtaacgagatctggcgccctcttctggagtgtctgaagacagctacagtgtacttacatataataaataaataaatctttaaaaaaaaaaa

SEQ ID NO: 954 - DNA, 120 bp, Mus musculus
  misc_feature (1)...(120): n = A,T,C or G
ctgggttaagtccaagctgaattggcctcgcttggcccttgaactcgggtngggcccgctatggccaaattcttttttgctttttacccctgggaaggaaatncttcattaaggcccccc

SEQ ID NO: 955 - DNA, 277 bp, Mus musculus
  misc_feature (1)...(277): n = A,T,C or G
tggagaacttctcaccttttgagcaagttcaagcctggntaagtccaagctgaattgggcctcgctngaccatttaaatgngcgccgccctcagaggaaattnggaatcncancgcgccatnttaaataggcccgctattggccaaattcttttgctttttacccttgngaagaaaatacttcataaagncacctctgttatttacccccaatcttcacaagaaaanattgcaaggacacctttatttctnccgtctatnaccaagctttccttcca

SEQ ID NO: 956 - DNA, 395 bp, Mus musculus
  misc_feature (1)...(395): n = A,T,C or G
agggaagtctagcgttttcagaaggacccttcccacagactcccttcatgaaggagagcatgcgcccctgatcactgccttgagcagtgtagagtctttcgtgcctcaggttggagattttatactggcttctgtctagtgaggaagacgaacagctctcccacactggagccataactttacccatgagccttcactctcagccagggcggacaagagcccagcgcgtctgagactgttcctgctctgacccagatatccaacctgctagtgngngaggncctctgctgagagaaagttcctaatccttaaaaagctcatttcatcctgcattcagngagaatttcnattgcctccttntttgcctcattaaaaagaccattttggcttccttt

SEQ ID NO: 957 - DNA, 103 bp, Mus musculus
gttctttataaaaatgcacgaggaaaagacgggaaggcagatttggctccaacttccacactgtcagcgctctgaataaagcaaaaagcttcaaaaaaaaaaa

SEQ ID NO: 958 - DNA, 318 bp, Mus musculus
gtggggtctttcaggtggaagccctgcggcggcgggcgggacgacagcttggtgacggcacgcgaaaacccaagtcgactgagctgaccaatatggaagtctttcgggaagatgtagcaagcgccattttcttaagctgccccagacctgctaaaccaactcagctttcagagtaacgcacgctggggaacttcgtgaagccaagctctcataaactacttccattttccctcttagtagaaagcacgctaacctagttacttccttttgcaatcacaaaggttaaagattttgccttaggcacctcaaaaaaaaaaa

SEQ ID NO: 959 - DNA, 103 bp, Mus musculus; identical to SEQ ID NO: 957

SEQ ID NO: 960 - DNA, 348 bp, Mus musculus
aactgagatgaatgtattttacctcatactatagaaaagagctgtatctatggtggcaggctctgtgtaattcccaacactgaggaggctgaggcatgaagagtttgcctggactacactgatatcttgtaaggatcagataagagtgagaaaatctggggctggagctgatggctcagctggttaagagcactgactgcttttccaaaggtcctgagttcacatctcagcaacgacatggtggctcacaaccatctgtaatgagatctgactccctcttctggagtgtctgaagacagctacagtgtaattatttataataataaataaatctttaaaaaagaaaaa

SEQ ID NO: 961 - DNA, 215 bp, Mus musculus
  misc_feature (1)...(215): n = A,T,C or G
gttcctttgtggaaagacggnaaattggncttcattctttgttcggtagggataccaaaaaatggtggaaaaatggccccaaggggaggaaagaggtcaagagggaggcttcacaatccccaaggcacaatcttgggcgggggtttcttcgggtggaggctgccttctttctaaacattcccaagacacccaaaatcccacttgaaaaaaaaaaa

SEQ ID NO: 962 - DNA, 103 bp, Mus musculus; identical to SEQ ID NO: 957

SEQ ID NO: 963 - DNA, 104 bp, Mus musculus
gttctttataaaaatgcacgaggaaaagacgggaaggcagatttggctccaacttccacactgtcagcgctctgaataaagcaaaaagcttcataaaaaaaaaa

SEQ ID NO: 964 - DNA, 104 bp, Mus musculus; identical to SEQ ID NO: 963

SEQ ID NO: 965 - DNA, 103 bp, Mus musculus; identical to SEQ ID NO: 957

SEQ ID NO: 966 - DNA, 103 bp, Mus musculus; identical to SEQ ID NO: 957

SEQ ID NO: 967 - DNA, 105 bp, Mus musculus
gttctttataaaaatgcacgaggaaaagacgggaaggcagatttggctccaacttccacacttgtcagcgctctgaataaagcaaaaagcttcataaaaaaaaaa

SEQ ID NO: 968 - DNA, 103 bp, Mus musculus; identical to SEQ ID NO: 957

SEQ ID NO: 969 - DNA, 103 bp, Mus musculus; identical to SEQ ID NO: 957

SEQ ID NO: 970 - DNA, 103 bp, Mus musculus; identical to SEQ ID NO: 957

SEQ ID NO: 971 - DNA, 103 bp, Mus musculus; identical to SEQ ID NO: 957

SEQ ID NO: 972 - DNA, 104 bp, Mus musculus; identical to SEQ ID NO: 963

SEQ ID NO: 973 - DNA, 314 bp, Mus musculus
  misc_feature (1)...(314): n = A,T,C or G
acgcaccaatgccccaccccaggggagggcccangaggccattgaccttacatgnactcntggagaaaatctctatcacttgacctttctgacaggcatacgtgtctgcaacttgcaaccaagcctcgccttcttgccatgggggaggcatgtctantgtantctgctgcctgacttactgctttcattgnatnaaaaagantngggnngnnngnnnanccanctctntgccattatgaaagcttgaatttggaacatgnggngtactgcctggagagagactgtgtcaataaaacacgacgtgcttgacaata

SEQ ID NO: 974 - DNA, 162 bp, Mus musculus
  misc_feature (1)...(162): n = A,T,C or G
tccagcatctggaccctgcagagggatgtgcacaactgcgctgagctgctgcggacagatggaagaggaaacttacaccctgcgggccccatagcagttccttagagtgaagaatgccttttggatttgttggttttgtttttgngactaaatgaaaaaaaa

SEQ ID NO: 975 - DNA, 387 bp, Mus musculus
  misc_feature (1)...(387): n = A,T,C or G
agatcttgcaggggagactgatttaatggatgagatactacaaagagtgaaggccaattcaggaaatttcaccgggcctgatgtgatggacatatggattcttctgttaggggctttgacagactgctgtagtgctgccgttcatgcacatgaagacgtcatttttcatatagatatatgtgcacaaatatctgagagatgctgttaaaacattcgtcgattttccaggagcgccttgctgtgaggggacattttctccacatacttcagccaaaacaacatgttgcagctggttaaatgcaggagcagatatgagtccagatgtctcttattaggacagacattaaagngtttgccanaaataccagtcatctactaaaaaaaaaa

SEQ ID NO: 976 - DNA, 109 bp, Mus musculus
  misc_feature (1)...(109): n = A,T,C or G
tccacccctgggtttctcacgacggagaggacttgangaggctcgnagcagctcttaccccccttttggttaccgaggataatnaaacgcgccaaggcttctgggctga

SEQ ID NO: 977 - DNA, 193 bp, Mus musculus
  misc_feature (1)...(193): n = A,T,C or G
acacatggaagtaaacaacaangatacatnccnactgtcaacttacaccccnntnntttacanaggaaaaactgtccaacctttttgagcaaagnntcagnctggnttaagtcccaagctgaatatgnccaantcttttgctttttaccctggaagaaatantcataangccacctctgtttatttaccccca

SEQ ID NO: 978 - DNA, 473 bp, Mus musculus
caggaagaccagctgaggttgggggctcacccatggctgagtaataatgggaggagcaggaagttccgcctctccagcccacttcacaggccctttctgcgctaacaaaggagccactaggggaagggaagacggtttcccggagaaagggcctcgcaatgctggaacaggagcacaatactactcctcatcctcctccaaagagctacagactcttcagtgcaggatctggcctgagcagcaatggaccagaggggtcccatggggtctctggctgcctgcagttatctcactagtctgtgagtatgtaacagggatggaaatgaagcagggcctacagagccctcccacatagtctcacaaccagtgaataaaggcccattatgtctggatgggccaagtgggaggcccagaaactaccctgcaggtcagacaagataataaattggaggaattattggcaaaaaaaaaaa

SEQ ID NO: 979 - DNA, 373 bp, Mus musculus
  misc_feature (1)...(373): n = A,T,C or G
agccgcccctgggccacnnaanttttggttggggtggggacaaagaaactttcccaangccgggaacaccccgggttttaacattttttccccaaagangggggangaaacccttnccggggggacccttcccaaataaagcttgggattcaaagcccccaaaggcccccttccccaagaagtctttggggcttcaaaattggtcccaacaaaacaatggacccccaagcttaccttccccccattaagggtgcaagcaanggttggaagcccttcaanccttccaaaccttggggaaagcttggtacttttgggtctcaaacaatcttcggatgggttggncttcacttggattaaaaaaggcaaatcaagt

SEQ ID NO: 980 - DNA, 302 bp, Mus musculus
  misc_feature (1)...(302): n = A,T,C or G
agctaccttgcatttaaagntcangcaaacttggagngtctcaagcanngtcangtaaagaagggtcaanttcangntccccttggnttgggtaggcttgggaagctaccanaagccaaacttggtngnanaaaaactaactcttggcaataattaacttctttcaaaaaaagccaaggtaaaccaaaggtggaatctttcccaacccccttcttggccttcttccttcttgcaaaggaaacaagcaaggtggcttctttaaacccttggttaaattcaattggggagccattttttcactt

SEQ ID NO: 981 - DNA, 199 bp, Mus musculus
gacccgcatggtgaaaggagaaaagtgaccccacgaagaaatctatgacctccacatgcacacatgtgcacatactcacatactaaaggaagaaaggaagaaaggaggaaaggaagaaaggaagaaaggaggaaaggaagaaaggaagaaaggaggaaaggaagaaaggaagaaaggaagaaaggaagaaagaaagaaa

SEQ ID NO: 982 - DNA, 253 bp, Mus musculus
  misc_feature (1)...(253): n = A,T,C or G
ctttcagatccactctgcagatggtgaagagggaggacgagacggactgaatgtctagacccatgcctcccctttccagttggcatgtggcagccttagttcagctgcatttgaagaactctaaagacaacgtgggaagactatttcaaatcctggtcctgatgacaaaaggttgtagtaaaaataaaatcattacacagtatagntgacagaacctcaacaataaagcaggtattttatgtaaaaaaaaaaa

SEQ ID NO: 983 - DNA, 175 bp, Mus musculus
  misc_feature (1)...(175): n = A,T,C or G
gccctgtacaagactccaacttgttgaaccaccaaaactgcctttggaaaaaaaaaggcaaccctgnnaaagatggnccagacattaagcccagnctgnggatgggngtgaacccaaacatggngnatcctcccggcaagctggaggtcgcagggaaagaggaagaccagagggc

SEQ ID NO: 984 - DNA, 154 bp, Mus musculus
  misc_feature (1)...(154): n = A,T,C or G
tcctcccggcaagctggaggccgcagtgaaagaggaagaccagagngcgctgtctgccttccagccggccctgnaagaggaagaagacagntgttcagaagcttcggaggnacagcagccattgcctccttgcaggcagaagaggaagcagagg

SEQ ID NO: 985 - DNA, 343 bp, Mus musculus
tgaagagcaatatggagcctcatgtgacctttggcagtatttgtggagatgtttaacacacagggattggaggataactcctggacagtgcccagggctgttgctcaatttcctacagtgtacaaggcaagccacaacagagaatcagagttgctgtggtttgagaagactgtagagcccgtaggagatggagacttgacagaggaggtacctcctcctgggggtaggcattgaagttttatggcttgttcccgtgagccaccttcctgttcctgtctctgtgtcttcctcaccgtgatggactctatcctcctgggaaagccaaaataatctttttctctta

SEQ ID NO: 986 - DNA, 508 bp, Mus musculus
  misc_feature (1)...(508): n = A,T,C or G
aaactgttttacgctggggaattccanaangngnacaactttnngaatcnncacnaaggaattttttntngagtngctnttggnattnngnaattanactncgttngggcgcagngaatttttnaancgcgncagnaatantttcaaccttgggcctantgaaaannatattgcaggtgcttggtaanatgaggctttgnganancgaaggggttaactcntggganccctntttnggaagcaaagtatcacgcctcgngnttaaagtccaaagcatggaaattggggnantcagcttgtgccattttaaaaatggggcngcgccctcgnagnggaaatttcggggaatccgggcggccgccaattttaaaaatngggcccgcttattgggccaaattcttttttgggtttttttacccttggggaaggaaaaaataacttcaattaaagaccacctcttggtttaatttttacccccaatccttcacaaagggaaaaaaactggtaa

SEQ ID NO: 987 - DNA, 135 bp, Mus musculus
acagagtcccgatgtgtagccctggatgtcctaggactttctatgttgaccaggctgacctaaggactgagaactctttaagagtttattcttactgtttctacttccttataattaaaggcatgtgccgcctca

SEQ ID NO: 988 - DNA, 106 bp, Mus musculus
  misc_feature (1)...(106): n = A,T,C or G
aataccaacccgtccaattancaganaaacnnntntnccttttgagcaagntccaccctgtgttaaaacccaaactcaattnnccccaccatttccatttcaacat

SEQ ID NO: 989 - DNA, 200 bp, Mus musculus
ggaagtgaaacaagtccgcataagtgccttgctttaattacatttactgtggctttcctgtggacgtcagaagacaacgcacggaagtccgttctctccttccatcacgtgggagactgaaccaggttatcaggcttggtggcaagcaaaacacttgtacattaaataaataaatctttgtagaatctgaaaaaaaaaaa

SEQ ID NO: 990 - DNA, 208 bp, Mus musculus
gtattttgagaagacttaacagcgtgcttacgccgaggaagaaaaattaatttggaaatgaaccgagaccctggggttgaaaactgttgaatttactggccttgtgcagcaatcacttttcatatttcaacttagtgttatatttttaatagtttctaaaaaaaaattacacctgtcaaaataaatagtacaatcagaacaaaaaaaa

SEQ ID NO: 991 - DNA, 332 bp, Mus musculus
  misc_feature (1)...(332): n = A,T,C or G
cggtggcaactttgaatttgcggtccttcctgcctttgccttnagagtctagagattacacaggtancccgtcngggaggtgacgcgtagaaggcatgctgcancntcacttgttgcttggtgggcttcnaagtggtaaaacntgnnnnngagtagtctctnttcnanccnncgagganccccgctattatctaaattcttnctccnngatncttcctaccttacaaccnanaccagaggggagtgacctgcagacgttttccagattcaaaaaaccaaatacnttggcccttctgcagaaaatgnttgacnctgnaccaaaacacaaaaaa

SEQ ID NO: 992 - DNA, 184 bp, Mus musculus
aagctgtcctctgaccacctcacacatggtatggcatgcgcacccccaaacagaaatcaacaacaaccaaagatctcaactggcttgggagctgcaaagggccaggcatgccagccagagcacttccctgaatgggacctcaaaagaagtctcggaggcgtggctgatgacaaccaaaaaaaaa

SEQ ID NO: 993 - DNA, 247 bp, Mus musculus
  misc_feature (1)...(247): n = A,T,C or G
ctctgagactatcaaggaattctgggataggggacctctgggcacgacccccaccntccttgnnccctagctgtgnagagaanntnttngngtgtttgcttttttgtttcanacaggatctctctctacatagccctggctgtcctggaactttctatgtagaccgggctggccttgaattcacagagatctgcctgccactgcctcttcaatggtgggattaaaggctgcaccaccaaaaaaaaaa

SEQ ID NO: 994 - DNA, 327 bp, Mus musculus
  misc_feature (1)...(327): n = A,T,C or G
caactgagaagaaatcctggcaaagacccannatgagagaggatggcacnattgtcagcagaggttcaacctgttggaccccaacaccaaacacaacacatcaggcgtcaggccgggtctgtgctggtcgtcacctctctctctccagcatccaaacaaacagcactcctcggcaggagcagatgtgggtgcctcccaccattaagaataaagcacttgggaggcagaggcaggcagatttctgagtttgaggccagcttgggctacaaagtgagttccaggacatccagggctacacagagaaaccctgtctggaaaaaacaaaaa

SEQ ID NO: 995 - DNA, 211 bp, Mus musculus
  misc_feature (1)...(211): n = A,T,C or G
actttgctgacaccagcttgnaagtgacttagggagaatctgcgaattccctgtgtttgcagttcagcccttggcagtgagcccagcaagccacagccccacagctggcaggagagtgaatgaatgcacaggggtggagggggacaacctcgctggttattcctgtccttgcctttgcancatctaattatagaacctccaaaaaaaaaaa

SEQ ID NO: 996 - DNA, 353 bp, Mus musculus
  misc_feature (1)...(353): n = A,T,C or G
gaattgagcttacaggtgatcaaggcaaggaaccgcacccctttctcctctgcctgctagctcanggcctggcattgagtgggagtttggagcacctttgnccctgtggagacaaaacagataaatccaagatattgaactcacttgacttccaccaacatagttggagcctgagagtccccanacttcactcggacaggggagaagggatgcttgctaacctgccagacactgcgatttctaggagaaacctcagcttcagccagtcttcccttcctggaggctggcccttcaagagagaatatgcaaatttatacaaaaagtaaaagttatacaaatgttaaaaaaaaaaa

SEQ ID NO: 997 - DNA, 417 bp, Mus musculus
tgagacttgctgaatcttaccctggctcccctcgcctccttcctgacgtgtgtgctcagtagcagctaatgactttgtgtccatgtctctgcctacatcagggacctgaggtcagagcctcaggccaattggcagaacctcagagtttctcctggatgaactgccattgctgaattgtgaatggtgttcgtgatggatggagctaccgtgctgattcctgtgaactgaactgctgccctcctgacaaagattgaaaatgccccaaagaactatttctaaacaggtccacatcctcctttgccctattaaccttcctctccactacctctggtgggcggtgggctacaagggaggttaaagtatttaagttatacttattaaagtaggttttggaaaatgtaaacctaaaaaaaaaaa

SEQ ID NO: 998 - DNA, 110 bp, Mus musculus
  misc_feature (1)...(110): n = A,T,C or G
ggtaggaccctatactgaatngcncttantgccgggagagtggtgntaggacncctttnatcccngnncttgggaggaagaagcaacacnggtaaaccttacactttatg

SEQ ID NO: 999 - DNA, 307 bp, Mus musculus
  misc_feature (1)...(307): n = A,T,C or G
tggctgtgatcctgtggctgcgcaaaggngnaagaggagctatttccaatctttgcgatctgctttttaagaggggcctatgacccaccaactttcactgnacganngaagtagngcaaggttattgngagtggncccagactaaagccagaganggacactaccttcaagagncgnacacagggctgnaaagatggctcancggntaagagcntntactgctnttccggnnttcccganttttaatcccagcaccgacatggtggctcacaaccatntgtaatgagatnngagaccctcttgtggg

SEQ ID NO: 1000 - DNA, 269 bp, Mus musculus
  misc_feature (1)...(269): n = A,T,C or G
gaactgaggtactatgtgcatgtngcacacattcatatatactgaagatagaacgtncacctaggataaaaaagtaaatgttctggtgagatggctcagtggntaagagcacctgactgntcttccgaaggncatggagttcaaatcccagcaaccacatggtggctcacanccatccgtaacaagatctgactccctcttctggagtgtctgaagacagctacagtgtacttacatataatcaataaataaatctttaaaaaaaaaaa

SEQ ID NO: 1001 - DNA, 419 bp, Mus musculus
  misc_feature (1)...(419): n = A,T,C or G
agactgaggggagatgcagggacactaatggancanagnctgaaggganggccatgcactaatccacccnaccttgggatnagactcatncggcacnacaccaaactgggncactattgctgatgccanaaagtgctctaagacagacattctgtaatgnatagnatgactgtcctctgggaagctctacctagcagctgactgaaagagatgcagagacccacggccaaacagtgaatggagtttggggactcttatggaagggttgggggaacaattgagggctccgaatgggataggaactctacgaaccactaaccaaagaacatactcattgaacctaggcctccccacacatatgtagcagatgtgcagctcagtgttcttgggggttccccanaaattggagtggggggctg

SEQ ID NO: 1002 - DNA, 539 bp, Mus musculus
  misc_feature (1)...(539): n = A,T,C or G
cttgtggatgccagaagaaatattaaaggatgtgatttaaaaggacggccatcttctaaggcggnttggagcatgctccaccagagtgttaaacttaaggacatctatgctgttcagctgagagcctcagtgtgtctgtctggtcagcatgaaaggaccacaaagacaaaaaaggaagtctatcaggtagctgttgttagccccaatgtggtgggtgggtgacaacaagaatatgttcatttatctctggacaaggtcttcagactggcttcgaacttgctacatagaggaaaatgaccttgaactgcttgcctctgtgttctgagtgctggcattaagggcatgaatcattatgtccagtctatgcagtgctgaggattgaacccagaggttcatgcatgccaggcaagcacactactagttgagttacaatcatatatattatatatagttatacatatatgtatatgtgcttatatatgtatataaacacacatgcatgcatatgtatatatacacatatgcatctcacataacag

SEQ ID NO: 1003 - DNA, 330 bp, Mus musculus
  misc_feature (1)...(330): n = A,T,C or G
gaagtgcctagatcaaganattctgncccagctaaggcttctggaaatgaactgtcagaggagaaatgagcagtaaaaagtgtgctcaagtcagccgtgaaacaatcaaaagtgtaggcatctcttaaaagtcttttgtaggggctggtgagatggctcagcgggtaagagcacccttttgntcttccaaaggtctgaagttcaaatcccagcaaccacatggtggctcacaaccatctgtaacaagatttgacgccctcttctggagngtctgaagacagctacagtgtacttacatataataaataaataaatctttaaaaaaaaaaa

SEQ ID NO: 1004 - DNA, 340 bp, Mus musculus
gaactgagtgagaggaggaaacagcaagctccctgagactggctgccagcaagtctagctgagtcaatgagctccaggccaatgaagaggctctgtctcaacaatcaaggtgaatgaaatctagcaagatggttcagtggttaaaggtgcttgtgttgcagaccagctaacctgagtttgatccctggaacccacaaaaaggcaaaaggaaaaattgactccacaaaattgtcttttaacctccacatatatactatagcacttgtgtaccccattgtgcatgtacaaaataataatattagtaataatagtaaacaaagttgatggcacctgaaggata

SEQ ID NO: 1005 - DNA, 293 bp, Mus musculus
  misc_feature (1)...(293): n = A,T,C or G
gactgaggctggcatgcgtacccnggctagcacctgtncntannttgangccnagagttgantngnngnatncctgncaccaataagacccacagcacnnctgncactgatagnggattcaaagaagacttttgtgttgccagccactgaaggcttgggactgtttgttatcatatcataatgctggcaaatgctgacaggtctatnccctcacaatgtgggtggttttagaaatatctaccttgaagtattagttgtaagtattaaataagattagtacatgaaaaaaaaaa

SEQ ID NO: 1006 - DNA, 174 bp, Mus musculus
  misc_feature (1)...(174): n = A,T,C or G
ttgattctgggctctgctggtgtggagcagtgctgtcangtntccnacntaaggcgnattntgtgttcttcagaacnnaanatncncactgtgtatgagnccnnggctaaactgggctaccctttgangaggagagatgcaggctttcatgttcnctatttagaggtctatttg

SEQ ID NO: 1007 - DNA, 310 bp, Mus musculus
  misc_feature (1)...(310): n = A,T,C or G
ttaaaagccagtgcatgctattgggcggaaagaggaattccacangtgtcacggagctgnnactctgntggccctgggcatttgccaagacctccacaggttgctaccanagcccagctaccttacatgtatgatcctgagnnttggaacctacctgaancagangatngggaccttaagnatngcctncatgactntgtagagaanctnacagaggaaatgacttagnccnttaaataaatctatgaaaacacngaccngggnnggaantgantaaaacngttaagaacgtgaagatggaatagaaacc

SEQ ID NO: 1008 - DNA, 525 bp, Mus musculus
  misc_feature (1)...(525): n = A,T,C or G
ggaaaaggagaaaggccatccaaagcagggacagctcagtatcaagttccctggtgtatccatcccacccacctgctgaccttccagngcctgctccaagngcctgtccgncctaagcaggacggcagtgctgccaatcctgtgtcatctgaggcaggncggccttgnctgatgcttttcttccggggcttccctggcctaggcctacactcgctcctggttcactttcctcctcagacaccctgccaccctatctctggcctgcacctcatcacgcacaccccagtaccctctccccatttttactatatggacatcttgtattcccatgtgcctgataccactctacagagncttaaggganaagtcaaacccaggactgaggaaatacaaggcctgatcttnagantgcttaatgaggagctactgtgttccagaggtcttagagaaaaggctccaagcatgcttgtcaagggactggctctagccatagctcctggngccggtactttggtaccaagctga

SEQ ID NO: 1009 - DNA, 492 bp, Mus musculus
  misc_feature (1)...(492): n = A,T,C or G
tttctactgctgctgncctggcttccaggcccctcaagacncagcataccnggncacacanntcgnctgctccgtgcactantctgcctctgcctccctagtgctgtgattaaaggcgntgctgccacnacngnctggctgnnaattgaattctttaagacctctgctcactctagncaaccctgctcattnagtntntgcttgctttatatttatatttatacataagtatcattgtagctgntnncagacncaccagaagaaggcatcaagatctcattacgggngattgngagccaccatgtnggtgctgggattngaactcaggacttttgnnagagcagtcantnttcttacccnctgacatntctgcagnccggcctctgggcttntgacccccacctgncaacatcttnctcctgtgcctgcttggagcttantctgtgngacaccagggttnctnagggnccctgtccatccttaaatccttgc

SEQ ID NO: 1010 - DNA, 345 bp, Mus musculus
gactgagtgtctatccctgatgagtatactaaagagaaatgtaccgtgtacggacgtttcccactcaaaggtccgtggtggcgcgtgaaggtccaggtcctgaaaccccagcgatccaggagctatcaagttcaaggctttccggcatactttctacaggttgatatgtcgccaccagatcaaaaacaaatctgttcgctttttcttaaagaatgcaacttagcctctgagcgcatacaggaatttttaaaatgggtagaaaaagtgtcaagctttgaaaatctacactttgaaaatctttgggaaacattaaggcttttctacagagaaaccgaaaaaaaaaaa

SEQ ID NO: 1011 - DNA, 392 bp, Mus musculus
  misc_feature (1)...(392): n = A,T,C or G
gcctttgccaagacanaanacacattgccgggngctcctgcttgncantgncannaatactgcgangctngggcgacacaaattactccatnaanggcaagacgtctgncactttntnagaatcaggtntgnctttntccacanangctncctgannggagggtctggaattccgctttttgatcatnncaaagngngncctttnaacancacattncaccatgccaacagccgtttccagagaggaactganaattaagtggagctntggttgcanatnattctttntncgtgcctagctacccaaacaaagagaccganccaaaagccagatctgcaagggcgcgtgcacaatgggactggtgcacgggaatgntcagggctctgcctga

SEQ ID NO: 1012 - DNA, 175 bp, Mus musculus
  misc_feature (1)...(175): n = A,T,C or G
gaactgagatagggaggncgctgcaggtcctccngncttcgnngaacaatgtatagcattgcgtggaananncattggtngaganatgagctagngtaccatccaagtttggatgtcaagctgtatactgtttcttcaaaaaaagntctaacaaagggatctttaactttttttt

SEQ ID NO: 1013 - DNA, 280 bp, Mus musculus
  misc_feature (1)...(280): n = A,T,C or G
caggttgttttttgtcnccaaagatctctcanacacttagccaccaactaggcancntacnccagcttgatatgaggccctaatacatacagcagaggactgcctcttttggcttctgtgaaagaagacacacctaaccctcaagggacttgaggccccaaagaatggggaagtctggtggggtgggtgggaacatccttgggagaaggaatgggatgaggaactgttggagggtggaccccaggagggagataacgactggnctggaaaaaatgattaa

SEQ ID NO: 1014 - DNA, 164 bp, Mus musculus
  misc_feature (1)...(164): n = A,T,C or G
tgcaccttatgagtgctgtgattacaggntnngcgccaccattgcctggttcaaacaaatccatgaatgaagcatatgactaaagttttcccagaggggaaattgacaacctgaacagttagcccttgcttattaaagaagtctaaataaaacgttaaaactga

SEQ ID NO: 1015 - DNA, 355 bp, Mus musculus
gaactgagttgatccttcccggaaacccagcagacggacggacgtacacttcaccgcacttggaggcatctctcagcccgatggagtcgacaatcaagattaagcaccgttgtctgcccctcaagtcaagtgtgacagccaaacatctacttaaaccataacatcacacctgccctgcaagaagctcattcctatttcacaatgcaacctgcggccagtccatctggaaggttccacatcatctcagcagctggcaattgctcaaaaacccaagttcatggtttcctcgcagatcctggctgtgcgcccagtgtttaaaaagtacacattgcttttttcttttcaaaaaaaaaaa

SEQ ID NO: 1016 - DNA, 438 bp, Mus musculus
  misc_feature (1)...(438): n = A,T,C or G
tgctctacctcctaagtacaanagagaaggcacgtttntccccagctttggttacatgccctgnnctgncctgcaacaanngggaaggcagttaggatgncagcaatgtcttggaccatcangagcccactgccntattncactgannnactgannagcatggtgatgcttctatntncacgggnnttaanctttaacacagaacagaattgtgnccgtnntcatagcacaaatgactgggntcaatcccagagttctgaagctggggtaacagatgctgctggtntatcntcttggtgaantactgctngagaacctgngagnngcatcctgngnatctgcaggccaacgcgtttgcatcttttgggaacctgcggnggngganctctcacacttgattgatctnctgacacctttggacattacccaatcactgga

SEQ ID NO: 1017 - DNA, 111 bp, Mus musculus
  misc_feature (1)...(111): n = A,T,C or G
tagagagtagtattgtnaaactaacccntcagatacgtgcttctgctctctatacttcctaggaacttccttttcgatttgtataaccagaaatatgaaacagaaatagaa

SEQ ID NO: 1018 - DNA, 347 bp, Mus musculus
  misc_feature (1)...(347): n = A,T,C or G
agactgagatgcccacgtgtanacctggtttctggcccagtcagcagcctgagaacaatgtcccctgtgggcatttaatcttcactgtcaactagcctggacttanaacacctanaaaatccngtanggcacacctctgagtgtgtctgtgaggatctgtacagagaagggaagacacatcttgaactgaagatggnatctnactgtctgggagtcccaggagggaaaggggcagaagagcagccgcctagctcctgtgtttcccagtttctctgcttcccatgtctgcttctgttttatttcattaagaacacatttgtatagctatttntgcgctgattggatta

SEQ ID NO: 1019 - DNA, 392 bp, Mus musculus
  misc_feature (1)...(392): n = A,T,C or G
tgaggtgagctgtccgggaaggattaggaggtgtggccttgttggaaaccaaaagcccatgcngtgagtcttgctctctgntggcaaagcaggatgtgaagcaacggngccagcaccatgccttnctgcctggctgtnccagcatataggactgacccgtacaacaggtaagccagccccagcacaacgggaccaacccctacaantgtaagccagccccagcatgatggcttcctgtaagagntgctgtnctcatgctgngtnttnacagcctaggattcctgctnntccggtngngtngtggcacttagtacctcatgttcttttactatgttaacaatgnnggaaaaccaaagtattnttcgggtactattnacttcacaaaattttct

SEQ ID NO: 1020 - DNA, 514 bp, Mus musculus
gactgagatagcccgctctgaaggggccatcctaacagaactcaggaggataaggaaaaagtattggacttcgtctttacccagcctagaaagaacttgccttacccctcagctagatctcactccagccctgtgtgtcagcagaagaaggtgaatctgcagagaacccaaggagaccttgagaggacccaggagcaagattcactcaccccgagccaggcagtggtggttgctgggcactgccaaggagggggccataatgctgggtgctcacttcccacccccgccccttggagccagcgagggaagggctgccccttgcaccttccagatccctgatgggagctacaggtgcctggctctggaagctgaggagagcagtagtgaagacggcttgcagggagaggtgaggctggtggacctggaagaagaggggaccagccaaagcagagccaaccatgggacaccaccattatccagagccccggccattaatccagccatccagctgtca

SEQ ID NO: 1021 - DNA, 378 bp, Mus musculus
tcttgaggaaagagctaaggttcccgtaataagaggcgtctctggagcccacagaatgcagcaggccagggtggtgacagcaactcaaacgctgggacctcaattatcgcttgtggactgggaaatgtcagcagcggtctcctgcacagcccccagcaccaggggacagatgaaacaagacagaaaaatccacgggctgagctcctacggcagaggcagacaccaggaggagacgccacagagcaattctggctctgctcacagtattcccaggagacagtatggtacagatgccacagcacctggcaccatgtgacctgtgtcacatggcagctctaccctcagtgaagactcgatctttagctgtaaaaaaaaaaa

SEQ ID NO: 1022 - DNA, 310 bp, Mus musculus
  misc_feature (1)...(310): n = A,T,C or G
cctctgagccctgtctgtnctggacttactntggaaaccaggctggcctcanactcatnagatctgtctgtgnctgctctnctaantactggagattaaaggtgtagcactaccannacacagatcactggnagaccatcctagcagccagacaccaccctatgtcaacccaagacggcttccagagatggnncctctgaagccctgactgtcctggaacttactctggaaaccaggctggcctcanactcaggagatctgtctgtgtctgcctcctangtnctgggattaaaggtgtgcactaccacca

SEQ ID NO: 1023 - DNA, 367 bp, Mus musculus
agactgagatttatagctctctggggaaactcctggaagaagtaatatatctgacagatatactatccaaaggcttagaagttagtatctgactagataaacaaaaatctaaacaatagctgcaggaaagaaaggaacaaacaagccagtttggtctgagaaatcagaactacgggggctggtgagatggctcagtgggtaagagcacccgactgctcttccgaaggtccggagttcaaatcccagcaaccacatggtggctcacaaccatctgtaacaagatctgacactccctcttctggagtgtctgaagacagctacagtgtacttaccatataataaataaataaatctttaaaaaaaaaaa

SEQ ID NO: 1024 - DNA, 374 bp, Mus musculus
  misc_feature (1)...(374): n = A,T,C or G
tttattttctcctatcctctggncctgtggngtcggccnntgacggatctgtgaccaacttcctgaaagccaccatatgtgtgttttcctgacacctgnntggntngagaagagcataggctgnnaaaatgctgnnactcactggatnctntgggtgagggaatgcttgtagtctcaccgggatnctntgtgttgatagatgagtgttntatgaaggctncantanctgaggattgtattacgagagacttgnntcccccctggangacactnngatntgctcacntctatgtctgttcacatctctgtgcggcacactctgagaggacctttctccanattataagcctaggctcttccaataacaataaaag

SEQ ID NO: 1025 - DNA, 322 bp, Mus musculus
gaactgagtcttctattcacaggcagtatgctgttggcagagccatcccgttccgcttttcagccttcacaattgcatgtaaacggagttggcattgcaggagagctttcatggggcagccaagtgtgccctcagctcactttccgctgtaaaatcatcagcaagtctctgtgccacgggaaggtggggaaggtacctcctctgagtgcatcggcacgtgggtgccttctgctgcccctgaccttccgacagcccaaggcctttcatagttcagaaggtgtggtcctggccgcctggggcactgggaagagatgaaggcatt

SEQ ID NO: 1026 - DNA, 516 bp, Mus musculus
gaactgagcacgcacagctgtggaagaggaaaaaaatgaaagacttgggagagccaacgcctgtccctgctctattgaaaggatctggctacagaaaaggtgtcatgcatcttcaaacctggctgccgttgtctgatactcaggcatcccgatacactccacaggatcctacggcacagcaggtaactgacaggaacctatgaaacgagacatatgttgaattctgtttacaagtaagaacaggtgacatgactagaccatatggtgcttcctggtgaccacgtgagccttcttagactgaaaacggttggttttgaagcaacaggactttccccaaaccatgggctttctacacttcatacacggcagaacaaggtggagggcggctgaggaggaagacaggaagagcaggaagcacaggcaggattcctgaggggaacaacttcctgtgaggacatccactgtgcacacagcacggcctcatcctcggcagccatggtatctcgtttaaccaag

SEQ ID NO: 1027 - DNA, 261 bp, Mus musculus
gactgagggcttctctgagaatcaaacagtggtgttcaaaaactgattataaattataaagctaacggtgctcaagagatgactcagtggtcaagagcactggctgctcttccagaggacgagggttcaattccctgcaaccacacggtggctcacaacctgacagtaactccagttccaggggctcggacaacctcacagacgtgccgtgccggaaaaacctcaatagacatgaaataaaattttaaaaagtttaaaaaa

SEQ ID NO: 1028 - DNA, 375 bp, Mus musculus
  misc_feature (1)...(375): n = A,T,C or G
gaactgagcaccagtgagtgccaacacttgaaacaggantaaactctcttncgccngncagnggngacgcacnccttgaatcccagnacttggnaggcanagtcangcggattnntgagttcgaggccannctgttctacagatgtcatgncaagaagnatggtgacatgcangcatacatggtgcttggagaaggagctgagaattctacatcttgatccgnaggcagcaaaaaganactgagntccacagtgttncagcttgngcacatganaccttaaagcccacagccacagtgaaacangtcctctagcaaggccacactgattccaacagggctacacctcttaacggagccaatcctaaaaaaaaaaa

SEQ ID NO: 1029 - DNA, 258 bp, Mus musculus
  misc_feature (1)...(258): n = A,T,C or G
accggatatgaagactcctgattncccctaggagcatatgaggatgatgacaggcgctngntgaggaacctgactgacttaagtcctggactgcttactgacaatgccctgtgtctgtcncttcagtatatttggcagtgggtccccattctctgtgagtttggaatcacttccaatagtacccatcttntctaccaggaggtcccatttttatatgaacagtanaagaacccctctcaatncacaagagcttaggtt

SEQ ID NO: 1030 - DNA, 109 bp, Mus musculus
  misc_feature (1)...(109): n = A,T,C or G
aggctgttcgtacacanngtacngcaggcagagcaaacccnaggaganctcgccaaganangacaatacacaaggcagtggtgggggtggggtggggaaattatcttta

SEQ ID NO: 1031 - DNA, 546 bp, Mus musculus
  misc_feature (1)...(546): n = A,T,C or G
aactgagggttgagatgaggttataaagcatggtcaaggaagatcttttcccaaagtcacggggcccagtctcacagactggagaagacccagcgttgactgccttgacaacagaagccttgtgggtcccagggaaacaaggttccaggggattcaacgctccctgctggcttcatcaagtatgcgtttggtacagagacgtacgtgcaagcgaaacacccctacacatcccccactttgccaggatctcaggaaaacaaggtcagctgctcagcaggtggtggcttcttgcaggaagttgcagatgtggcagacaatagactttacctaggtgggaagactccatccatcaactacggcaaacaacgtctggtctagcctgctcaaggctgggggaggacacaccaaaccaaaagctctactagtgcagattccctaccaccatgatgtgaagggctctgccccaccgtggttctcccagcctcgattcagatgcangatgcacctntccagcctncgtttctgnattattttttaaacaaattg

SEQ ID NO: 1032 - DNA, 128 bp, Mus musculus
  misc_feature (1)...(128): n = A,T,C or G
agctacacattcccttctctctgctacnctcagngtcgaaacacagcgccgggngcnnnggntgcactcannaanccntggagcattgaagagccattaaagtgtcttaaagaacggaaaaaaaaaaa

SEQ ID NO: 1033 - DNA, 209 bp, Mus musculus
attctccatttggctgagctcatgaagtgacactgtagaaaacttttggcagtcttctggaaggggctttcctctccagccccactgtgttggggagtagaagatgaagcaggagccatttagccagattctattttgttttcttggggatgctgtttttatttgcagacttccaatcatattgcctattcttttcttaaaaaaaaaaa

SEQ ID NO: 1034 - DNA, 241 bp, Mus musculus
  misc_feature (1)...(241): n = A,T,C or G
tgcttcagcactccttaaacanggatgaccttctntntgngggtcctcancatcacttcgatggggngagaccagagccnaactctgtcagagcancnggtctgataagangcattcnagaagcattcaagcatccanggctgccttggaaatgtccgctcccacnttgnngcctcaaactgcctanctgagncatatctgcttgctcancgtacatcccatagagttttatgattctttt

SEQ ID NO: 1035 - DNA, 257 bp, Mus musculus
gaactgagaagtgcccctttgagagagggacatgagcattcttttgtgatgctaagacattactcaccggacaagcagaagggacttcagacatgggagacccaggagccaccccttctatacctctcacttgcttaagattgggcctaaagcagtggttcttagccgtcctaatgctgggacattttaatacagttcctaatgctgtggtgacccctcaaccataaaattatctgttgctaccttaaaaaaaaaaa

SEQ ID NO: 1036 - DNA, 169 bp, Mus musculus
  misc_feature (1)...(169): n = A,T,C or G
gaactgagaaaacctcgnattcctcgntgtcagttgcaggcttgtgggatgctgctcanagcctggnnatccgttctaaacactcagtgatcatcaccaggnctggtcgaagcaaattgnttgctgctntncactgtggaaagccttgctttactgtacccttcattaa

SEQ ID NO: 1037 - DNA, 388 bp, Mus musculus
  misc_feature (1)...(388): n = A,T,C or G
cctgagctgccggcgaccagcctgaaacctnagcttatcctcagtcggaggttcanagacacgcatnggtgaccccanaaacacttcgctcggaagcgtcagacccactccagctgctggtttatacagcactacacaaagccctgcccgctcacacacgctccttgatgtgcatgcagaggccagagcaggatgttaagacaggctctctcattgaagcagaagttccccatctcagggaccacaganatggctcaagnggtgaaggtacntactacnntgacnngacgaacccacnaagaaagggagnactagntncnacaagntctttgncctccacattgtgcactggcgcncacangcacagncgcatatgaatgcacaaaat

SEQ ID NO: 1038 - DNA, 484 bp, Mus musculus
  misc_feature (1)...(484): n = A,T,C or G
gagactttagtccatctaacctgtaagtcacagacatctccgaaagaaagtatattattaagaagcagtgagtgaggtattttgaaaaaattggaagacttaccatgagtttaaacacttcaagcaatgccactcctggggacactcaaaggttgaaaaatgcctcactggatgtaaaacaaatgcttaaaaatgaaacagagtcagatatcaccgctgatctcagaaagaagctccatcgggctaagaaggagaaattagaaatgacaactaagcacaatgcagaggtagaatttattttcctccaatatagtataaaaagttgagtttcaggcgtgtgtggtggcacacacttagtcccagctcttgggaggcagaggcaggtgaatttctgagttcgagaccatcctgatctacaaagcgagttccaggacagtcaaggctacacagagaaaccctgtttngaaccctgtccttccaaaaa

SEQ ID NO: 1039 - DNA, 323 bp, Mus musculus
  misc_feature (1)...(323): n = A,T,C or G
cggggccttctacagagatctgcaatgtggacaaagtacatgcctatgcacagtcacacaaagatcacatgaatccaanacacggntccccanctctatataacagggtcaccgcttagacatgcagcactctgcagagcctaagggatacccaggtgctcagcaggatgttcagaggaagtaggagcacgtactccttagaagagggctttcccagggcaggtctctagggcaggaggactagngggttatctatggncatcctgtttcttcttcctgggacctggnccggattgcattttanagacctgctaggagctaag

SEQ ID NO: 1040 - DNA, 525 bp, Mus musculus
  misc_feature (1)...(525): n = A,T,C or G
cttctaggatgatgttgaacagtagctggcaagctgaccctggaggaggcagaagcacactcaaggcactccatcacacagtgagcgtgaactgtgcacactctaggcacatnctggagtgactcattacaatggaaacagnggccactcaggtgcttggagtgcccacatcttcagctntgagtcttcatagngatcctntggcactggtagtttttctccatccccatatgactcacttnggtttacttttgagggagcagctaaattaggcactgggacttttcctcttgccagagtttgaggcaaaccacaagattctaaagtccctggatgcaggccagaccttggagatgcgctccagtgnctgactgtccactccctgaagtattacaagnggtncccacggnccaacatgctcactctcctgtgtcatcactgatgttatgggaaaggggacagtgcctgtgcacagccttggcggnggcttgaagagggagccaggttctacccatgatttgatga

SEQ ID NO: 1041 - DNA, 125 bp, Mus musculus
  misc_feature (1)...(125): n = A,T,C or G
tccagtgggacaaagtgtaacatgacnccctnactgncaatcttagtgtatnaggcntttgntcnttctantggatgtggngacaangaccggagaagangnttacagacctatatctctcatgg

SEQ ID NO: 1042 - DNA, 380 bp, Mus musculus
aactgaggcatcttcaagagctgaggatctgctatcagggccgctcagaaggagagagatgaagcaaggcaagaccccatcagaagagttaggaaaggactcacagaactgaaggggattgcaaccccataggaagaacaaatcaacccactggaccacaaagagcatccagggtctaattcacctaccaaagagtatgcatggagagatccatggctccagctctatatgtagcagaggatggcttcatctggcatcagtgggagaggaggcccttggtcctgtggaggcttgatgccccactgtagtctgataccagagcagtgtgaatctggagtgggtggaggcaaagaggagagggggatgggatggtgagtgtg

SEQ ID NO: 1043 - DNA, 117 bp, Mus musculus
  misc_feature (1)...(117): n = A,T,C or G
gaactgaggttcacctatannccagtacttggaaatctgaggaaggaggactgccatgagcctgaagacaacctgggctacagagtgagaccttgtccaaaataagggaaaacaaca

SEQ ID NO: 1044 - DNA, 221 bp, Mus musculus
tgtgaggtcccccagccacagactggtggctcttgacaagcagaaccaggtccattgctgaagagagtatgtgcagtggccatctggatatccttggtcctgtgttggaccaggaacactccagttgctcttttgtacacgtccctaaaaatcatgtcactgatcctgccaggaccctcagggaagcacctagctgctcaataaatcctggaggaatgaaa

SEQ ID NO: 1045 - DNA, 283 bp, Mus musculus
gtgtctcggaacaaggtttctctgtgtagttctggctgtcctagaactcagagatccacctacctctgattcaaaggactaggattaaatgcccggttaaagaagatactccagggctggagagatggctcagtggttcagatcacagactgctcgtccagaggtcctgagttcaattcccagcaaccacaaggtggctcacaacacctcttctggtgtgtctaaagacagcaacagtgtattcatgtacattaaatgaataaataaattgtaaaaaaaaaaa

SEQ ID NO: 1046 - DNA, 150 bp, Mus musculus
gaactgaggaacatggaacaagatgcttctacactaaatccaattgctctcaaggaggacatttctacagcagctttatcatggaatgatctttggagaccttaaatacacacaagggccagcctactggcaattccccaaaaaaaaaaa

SEQ ID NO: 1047 - DNA, 524 bp, Mus musculus
  misc_feature (1)...(524): n = A,T,C or G
gaactgagatgacaccatcagattgaccagcctgtttcgggagcccgcactctacaccactgtaaacgcagcagacacctctgccgagatccccgagataaaggaacctgcaagagcagcttcccatgcctgtctggagcatgtgagcccagaactgtgagtcagaaagcccaaggcctctgtcaccaactgctccaggacctcaggcaagctggcaaactctctgctctgaattccacaactgtaaaaatggggctaataacacctgtttaccacctcccagcaaagaggacggtggctaatgaacacctgcaaggagctttgaagatgaaaaaggttcccctgtgctaatgacagcagtgagggtcactttactctccctgggagccacaggctgccaccaaagccattcatccaaactttttgcataaacaatatgaagaaggtggngatgcccggcacactgggtagtaggaaggaccccgaactgccagctcttgccttggggctgatgggtaaatatt

SEQ ID NO: 1048 - DNA, 328 bp, Mus musculus
  misc_feature (1)...(328): n = A,T,C or G
actgagcctatgaagaagtanacacactgnttctaanggggcagatngggaaacttctntgccagagaccaagaactgatncttcaaacaacataangctgnttttgacaaattaatantgatatatcaactgancaccataagcagnccggaaataggctcatacatattctaacacccaggaagcaggtgaagagcataatgagcaagcttctggaagttaatgnggaaaagtacgtgcacagcctntgnttananaanagactccttaagcgaggngctgcgtgtacgtgtgacanacaaaagtnttnaacaggcccttggaaaa

SEQ ID NO: 1049 - DNA, 183 bp, Mus musculus
  misc_feature (1)...(183): n = A,T,C or G
agatggctcagtggttaanagcggagactgcttttccagaggttctgagttcagttnctancaaccacanggtggcgtcacanccatgtgtnatgggatncgnntgtcctnttntggcgtgtttgaagagagtgtacttagcntacattaaataaataaataaataaatctttgaataaaaaa

SEQ ID NO: 1050 - DNA, 159 bp, Mus musculus
caagttgttgtgttcagcgggcatgaggccctcggcctcgtctcaggggagcccggtatccttgccctctgacctctccttccactcccccactcccagcaacctgcccatggaacagctgtgggctgtccaccgcacatgaaggcttcttgtacctgt

SEQ ID NO: 1051 - DNA, 172 bp, Mus musculus
  misc_feature (1)...(172): n = A,T,C or G
gccacaggctcaaagcantggttggganaatggctggagcntcngtatgggtcaccggnaggaagtcaaangtggggccntnaaggtggntcanccagtacagaagttttgtctgcgaagatnnctnatctaaatacaaccactgcnacctcccatggaaggggaaggacaa

SEQ ID NO: 1052 - DNA, 215 bp, Mus musculus
  misc_feature (1)...(215): n = A,T,C or G
agactgagctcccagcanagctgtctaagacaggcatggtggctcgtgactacaatctcatctcctgagtggctgaagcaggaggactaccaggagacggaggccacatgaataggattgcttcaagtttttggccagtctcagtcatataacaagaccctgtcttagaaaataaacagcctgggggttgtggcccaagtctttaaaaaaaaaaa

SEQ ID NO: 1053 - DNA, 302 bp, Mus musculus
  misc_feature (1)...(302): n = A,T,C or G
agacctgaggacctggctacacacacctcgaaggaatgatcctccatccccctgcctccacatggccttttcccctgagctctgctacccttggtgaccccacggaagcccaagagagatggacagagactcacaggggctgtgtcactgtcactagtggaagagttgcaggcctgagngcacctnctgngctgattgctgcttcttagaccctggcacatgtctgcactcccacaggagaccagattgcctgcttggaacgccccgggcctcanaaggctctcaggtccttctcctacgaa

SEQ ID NO: 1054 - DNA, 235 bp, Mus musculus
  misc_feature (1)...(235): n = A,T,C or G
tggaacaagaaggaggctgcatcggagganagaangncnnatngnangaaagactangcctagagncngcattantgcnaccanaccnctgattnngcacnttgggagggggccacctggccttcctgacattctctcgaatcctcaccggtctgctccaaggtgtcnactttccagccctgaccagnntgctggcccanaaagtacaggagagcgagagagcctttacctacag

SEQ ID NO: 1055 - DNA, 184 bp, Mus musculus
gaactgagaaagttgtcagcaatcccccaaaatatcaaagagtgatttcaaatatgttcaaggaagtcagctgtgtgcttattctgtgttaccaagaccattaatacatctgttttaacaacaatgttccaatttattacgtaaataaaaacttaaaggtcagtttctcggccagaaaaaaaaa

SEQ ID NO: 1056 - DNA, 256 bp, Mus musculus
  misc_feature (1)...(256): n = A,T,C or G
cctcacatgcctgattactggncntngacntctgacactgaggacaggaatnatcggacggatgcntactganggngtgtgagagggtaagtctctgcncnctgcnnactgagccaattcaagccagattatattatactaaagganaccataagngatgcctcgaaagccaagaaaagccgagcgtgnactataaccttgatatcgtnaaccancgncttcctgaggggcangtttgggccttgattatcccatt

SEQ ID NO: 1057 - DNA, 538 bp, Mus musculus
aactgagaaccgggaccatgctgcattcgacatcgttcctggtggctgacttgttcccatagaattaaatgctaggcatccagaagctgactgtgcatctgatgggctcactaacattcaggaacaggttggcctcagacttcatcaatggaaagtgagctgaagtctttctgtttacaaatttgccaatttcctttgaggaagcttgatcacggagctcttctgcatcaggtgattgatgccctgcaggtacttcaagcaacatcatgcatatcaaacctgccctctgcctggactgtttacagctgcctttttgctagctgaactgcctgacacttcggctcaaagactcatttatcactgagggcgcatgccgttatctgagcaccttccgaagcatcacacgccatctctagacttcctgggattgtctacggatacaacacttgctctcataagttggttacataaacataaaagaatgaactttaaactaaaatttctgacttttatctctttgcagtgtaggcataggaca

SEQ ID NO: 1058 - DNA, 340 bp, Mus musculus
  misc_feature (1)...(340): n = A,T,C or G
agccacatatcacctacgtccctnacccacnanactacagcggnatactctgttcccccgaccccgcagcgcanttccttnnaggngcccacgnncgngaaccacccgcccgccaggaacgctgncnctagcaatcactcggnggtcccgcagctcacccgcttcggtctgccgggcgcccggcaggagcggggtgctgtccgagctctcctcatcgtcgtttcccgccggaccccgaagcaggggcctcataacgcctggagagcagatgtgccggcgttgttgcttggccaacctagctctcggcaggacagcccttcgccgtgctggcttggggcgg

SEQ ID NO: 1059 - DNA, 376 bp, Mus musculus
  misc_feature (1)...(376): n = A,T,C or G
agtcaccaacttgctntattacatnntgacngacacantcttgatgttctacaaatcatcctagagaatcgcatgangaatcttgtttaaaagccagtgcatgctattgggnggaaagaggaantccacaagtgtcacggtaatatccggtacccagagtcactcttcctgcgcagggggatgttgccggtcaggcttgggaaacagacccacgggaacatcaacaacctgtggcctcattgccctgggctgggttggaccggagactctgttatctttngtttataattaatctccatggagttaaaaaaaggtcatttttttgtatgttgggcttagctttcataaatatgcctaattgctatcaaaaaaaaaa

SEQ ID NO: 1060 - DNA, 248 bp, Mus musculus
  misc_feature (1)...(248): n = A,T,C or G
gcatctttcatgtgctgtatacatntcatcgattttatgtgattatataaantctagngtnttggggctagagagatggctcagcaggttaanagcnctgactgctcttncaaagatcctgagttcaattcccagcaaccacatggtggctcacaaccatccataacaagatctggcgccctcttctggagtgtctgaagacagctacagngtatttacataaataaataaatctttaaaaaaaaaaa

SEQ ID NO: 1061 - DNA, 528 bp, Mus musculus
gaactgagtgctttacctgcctgtctgtgcacacatgcacgcagcgccaaggaagccagaagagggtgctggatcccctgggactggagttacagatggtagtgaacctgcatcactggtgacatcaccacctgtgtgacatcaccacctgtgtgacatcaccacctgtgtgacatcaccacctgtgtgacatcaccacctgtgagacatcaccacctgtgtgacatcaccacctgtgagatatgcaatccagatgtggcgaatcagactcttgacagggtaaggccaagacacctgcaacaagtcttacaagcgactctcacgcatgctaaagctttaggaagatcacctggcagagaggttcctgtctgggtcaaacttaagatggttgaggactggagagatgggtcaggagttaaaggtactcgctgtggaagcatgccaacctgaatttgattcccagaacccacatgaagttgggagtggagaacagattccataaagccgtcctcttaccaccacaggtgc

SEQ ID NO: 1062 - DNA, 150 bp, Mus musculus
  misc_feature (1)...(150): n = A,T,C or G
tgacttcaggagaccccagaactgtncgtaacacaantgattcatntnccccttggcagcggacatattgacctgcctccggagctntgntttgncttncgtaggncaaggcgnnggntctctctctctntttttttttaataaaaaaag

SEQ ID NO: 1063 - DNA, 394 bp, Mus musculus
  misc_feature (1)...(394): n = A,T,C or G
gaactgaggagctgttgtattgtctcctcgtgactgaactcaaggggatggacatgctggggactacgacacatggagctgtagttactgcctagagacacttctccaaagagaaacagccctgacccatggtcagaagctgcaccctgaacagtggcctccctacctgaaggagccacttctcctgccgtgtgtcaccgagcttcagggtggccccaacaatcttctgtaagaaacctgctcaagtctgtcccaccgngtnagtctctgggtatgtaactttgtttctcgtaagtgttccactcctcatataacacatcagagacttgaaaatgtccctgtttatagagccccaggcaggtgtgactttcatatagataataaaggaaaagca

SEQ ID NO: 1064 - DNA, 283 bp, Mus musculus
  misc_feature (1)...(283): n = A,T,C or G
gaactgaggctgccttggagactcctgggctcttcctgacatcctcctgcctcagcttcctgggaagctggaactacagtcaaaacaataccacatacaactctcttacacacttctaggttngntnncttttcttgttttgtttttcgagacagggtttctctgtataggcctggctgtcctggaactcactttgtagaccaggctggcctcgaacacagaaatctgcctgcctctgcctcccaagtgctgggattaaaggcatccgcagctgccaccaaaa

SEQ ID NO: 1065 - DNA, 166 bp, Mus musculus
  misc_feature (1)...(166): n = A,T,C or G
gaggaacacaagcaaagnatggtcaagagccatcgttccagcagctgctgggggagtttgcgaggnnttgaagnctactaaaagagcagaggcngatgaccctcaagatatggcctgcaccccatcaggggattcatttggagacaaaggaaagagcataaaatgt

SEQ ID NO: 1066 - DNA, 493 bp, Mus musculus
  misc_feature (1)...(493): n = A,T,C or G
ggcctgatgggacaccagacctcnaagaccctganantgccatccgcntcttatgnnttgcgtnctactaaaagggganccccatgtatgaccagngtagncngcanagccatgcctggngctcantantganccaggcccncnnattacagancattacgngcgctggcctgnagtgnctctnnnttaacacgancacntgagntnacnctccatgcnntccaaggttttggagatacctaggagggagggggtctctggtagatcacaagaccccacnggcactggacacnccntgcatnaaaaggananaggctgcggatgganactggcagggctctgactcggaatagncctgctatcacaggatttttctgaagaagccaccttcggatccactgttgaggtttggcctattgnaacattacaatgacacgcattgtaatggtaaattgtgnaccttgggaggtctgcctaccagcttttgctgggg

SEQ ID NO: 1067 - DNA, 160 bp, Mus musculus
  misc_feature (1)...(160): n = A,T,C or G
ctgagactgaggatgctagggatnnagnggagcaccacgcacnggactgncntcttctcctgantncngctgnncccancttacngaagaggaaaactgaggacttgccattccactggaaaatctagaaataaactatctgaatcgtgaaaaaaaaaaa

SEQ ID NO: 1068 - DNA, 165 bp, Mus musculus
cctgcctctgcctcccaagtgctgggattaaaggcaatcgccaccacaccctgccacaaagtaagctgttaatagattcctggttaatgaagattatttaagacagcccattgttttcaagatgactattaaatataatttagctttcgtgtgtaaaaaaaaaaa

SEQ ID NO: 1069 - DNA, 115 bp, Mus musculus
  misc_feature (1)...(115): n = A,T,C or G
gactgagctccagagggatctgatgccctcttcctgncctccatgngcacctgaagctacatggcagacacagacagactcacacatcaataaaaatgtttttaaaataaaaaaa

SEQ ID NO: 1070 - DNA, 531 bp, Mus musculus
gaactgagatgtgtgcacctcgaagcttaggtgggactacttgtgtgtgttgtagaggaaaagtgacagtcaggccccatcatgttgagtggataggaagaaagaacagtccatccagcccccccaggaaaaggagcccaggattccagtagctgaaacagcacagaagaaactaccgtatatgtgtgtgcacatgtgctggctgggctaccccggggactcccagcttcctgcccatagtattctgccagtgttgccaagcccaggagcccagcacttactgcagtgtatgtagtgatggcttcccaggtctgtccttgcatcattaagaactataaacacttgtttaagttgtagaggcttactgtcagtaacaacttccaagcaatcaacagactgggccatctgaccacagtgagcaactgcaaagcctgcagaaaggggctcagctggataggaccgggatacaggagctcagctgggcaggaccgggaacactggaagagagcccccggctggacttcccttccc

SEQ ID NO: 1071 - DNA, 179 bp, Mus musculus
  misc_feature (1)...(179): n = A,T,C or G
ataataagaagaggaggaggaggaggaagaggaatgnnagcccggaaggcttctcaccttaggcgtcgcnanaagcagaggccagangaaagnggtgnncagcggnaagaagngggtggctttttntccccgtccctagtnttcctaggccntnatntaccgaagaatgtggtgttgtg

SEQ ID NO: 1072 - DNA, 409 bp, Mus musculus
  misc_feature (1)...(409): n = A,T,C or G
gactgagactaggaccatcatccccaggngcgaccacccacaagtgaactaaaccctcctatctaaacaacaatcatcantcaaaaanaccaaccaaccaacaacaaccnanacaaccggtacgacagccctgcccacaggccaatatggttggaggcattttctcaattgaggttccctcttcccaaatgactttagcctgngtcaacataaaactagcctgcgcagactgcaatagccttcctgaatcagggactgggactgcagtgtgggacttgactgtcctctgattccctcatatcttattgactgggactctgtctggatacttgtgtccagttcattctggattttcctctatgttngccaataaactaactcctggttggcttcctggcaaaaaaaaaaa

SEQ ID NO: 1073 - DNA, 116 bp, Mus musculus
  misc_feature (1)...(116): n = A,T,C or G
aagggggctttcccctncttnntnatncttccaaagnanggaaaaaaggttttttattnaagggggtttgggggcccaattttgggccccccccctttgggggttttttttggggg

SEQ ID NO: 1074 - DNA, 369 bp, Mus musculus
  misc_feature (1)...(369): n = A,T,C or G
tcaccactattgcctcatggacctcangaaagcagtagacgccgttgttttatcggaacagagttgaanaacattccagangtatctttccaagcacacacttngcanacatgaatacatgaaatgaagacatgaagtacactcgggttaaaacccactctgctgactccttgataannatgttctcactcnngggtggccagcaatgngcggataccgcctttgacaaatctgnattcaacttgaacagacactttagcacaacggtgggaaaggcagggagccaggacgtgagaagtcctgtatggtcataaacagctaagtccaaatataaactttcatattctgtcagaggccaaaaaaaaagaa

SEQ ID NO: 1075 - DNA, 366 bp, Mus musculus
gaactgagtgcttatctgtttccctgatgcctgagacaaaccccactgattattcagaccttgaagacttctcaaagccatcatcctagggctgcccaacactagtgactctttcagagttccaggtctgggttggactggtcagcaccacccctcagtccgcaggcttgcagaatccaggggctcacatggcatgtttcagcatcatttctcttcactccctgtggagctcacaatggagacagccaacaacaggactactactcttaattacctagaagttaaaatgtgctatttaatctattaatctattgaaaatatttctgaattcaataaatctcttttatttaacctataaaaaaaaaa

SEQ ID NO: 1076 - DNA, 117 bp, Mus musculus
  misc_feature (1)...(117): n = A,T,C or G
ggcgtgcggactgtcctccccagggagccggtgtgccgaggagggananagctggtcgncnnnngggggcatacangngacgcatggttgatgangantcaccctgaactgcgctca

SEQ ID NO: 1077 - DNA, 248 bp, Mus musculus
  misc_feature (1)...(248): n = A,T,C or G
gtgggcatggcttgatcatctgagccctcaaagaccgcccacagtgacacacatcctccaacgaagccacacctaccccagcaaggccgtacctactaatagtgccactccctatgggcctaaggaggccatttttacacagaccaccacagcaaggaaaacactccaccaactaagatgtttgcccagccctcatttactaactcttttttttttttttttccngnttttnaaaaaaggggtttttt

SEQ ID NO: 1078 - DNA, 302 bp, Mus musculus
  misc_feature (1)...(302): n = A,T,C or G
gaactgaggatcccacnggctccctgcctgccatcttcccacagcanatcggatcacactcagaagaatcgctgactctctggtgaagctccaccaccttcttaagaataggcttgcggnctggagagatggcttancaggttaanagcaccgactacccttccaaaggtcctcgagttcaaatcccagcaaccacatggtggctcacaaccatccgtaacgaaatctgatgccctnttctggagtgtctgaagatagctacagtgtacttacatataataaataaatcttaaaaaaaaaaa

SEQ ID NO: 1079 - DNA, 244 bp, Mus musculus
  misc_feature (1)...(244): n = A,T,C or G
tggcctcttctgacctcctcaggctcccaaactcacatggcatatcctcataaacatataaaaataacngttangaccatgacatggagagctctaagcagtctgaattcttcctatttttcaaacaatctttttatcctggaggaaatatatatatttcaagagtcacagtacttaagatatacttgaattttatacatgaatacantaaaatatgatcatgtgcatccctcaaaaaaaaaaa

SEQ ID NO: 1080 - DNA, 302 bp, Mus musculus
  misc_feature (1)...(302): n = A,T,C or G
aggtcggacaggagaaagagaagcaggcaactnggaanaacgacttcannagccctgatgacntactgnggaagcccctctaatccatcnatgtnacgcgcactcctnagaantttgccttcctctctntcccccccatnttgaggncatatggccnntngaannttttgttngctngcaggggaaaaccccaccntgccagggcggagtggaatctctttctcttattattantanaactnagcanaaggagacagcaatcttcgtgcaagataccctngcgntccataattaaaaaaaaa

SEQ ID NO: 1081 - DNA, 339 bp, Mus musculus
tgagggtagtggtgcttgactcctgggttatgtgaactccaggctctactgctgagttactctccagataatagcttatttaaacaatgtatcaaactaatggaaatgagatttgtttagggctttttttgtttgtttttttctttgttttagttttttaagacataatttcctgggctggtgagatggctcagtgggtaagaacactgactgttcttcttccaagttcaaatcccagcaaccacatggtggctcacaaccatccataatgaaatctgacgctctcttctggtgcatctgaagacagctataatgtacttacttataataataaaaaaa

SEQ ID NO: 1082 - DNA, 515 bp, Mus musculus
  misc_feature (1)...(515): n = A,T,C or G
gaactgagggaggagangtaggtctcccctcccccagcctgaancctgcttgctcggggtggagctnactgctcattcnttgtaccacgcccacgtgctgnancctgaggagccacacacnngcacctttctactggancaaaganaattcaggcaggnaatcgnntnccctccccctnncttcataactagggncggtagcantannatttgagnctngatnatnntnnttncaaggacccaanatnacttcccagnaccaaaagctggcgtacaaccttttggaattaacccaagctccagggatccacgactttcttctggcctcagtggacagttacatataggtaatgtaaaaacagagacgtattaagacaatttttaatgctggtggcagtgttgtacacctttaatcccaggaatagaggggcagaggaatctccgaaatttcagtcaatgtgatctatacaggtgagttccaggctatctaaggatacatgagaccctgtcacagc

SEQ ID NO: 1083 - DNA, 343 bp, Mus musculus
  misc_feature (1)...(343): n = A,T,C or G
gtgaaccatcacacctggtnaaaggggnccatcccccattccctttgaagacnggttcacagtgcagccctaactctcctagaacttacttccaacaagctggcctagaacacagagctccacccaccttgcctcctgagcgctgggattaagggctcgggttaccatgctcgccttgcagacctagcttgttttaacttcagcacattttacatcctgatggtcaggtgcctaggaaagcggctggctggtaaatgtatgctgtgcagcaggagtgtgatatgagcttaggaggagggagccagcactggcttccaggcagctgcaggagaacacaccagcc

SEQ ID NO: 1084 - DNA, 530 bp, Mus musculus
  misc_feature (1)...(530): n = A,T,C or G
actgagttcctaatgtccagggcgcgccctgggccacggaaggcttaaaggagaagaagagagcaaaaccggtgcgcgccacacggtttcggaccatctacaaagctgtgctctaggcgcgacagcccatcccccagcgcgtgggcgcagaacctgctctcgatcaagggaaaccaaggcagtagcagagaataccgagttggggcnggccgctgtagagcttattataaagcataacgggggaagccagactgtgggcaaaacaaaaggagagactatttggcggagtcggaggtcgctgggatcgaaactcccgaggcaagaaagctggctgtggattttgcagcggggatattgtgtgagcaaccaggcagaaattggcaatatgtaaaagtgggaggggggagagagtgggcggaaaggcaaatcagtgcctagaaggctgcgcacggctgggaaatgtcaccaaggagagcgcagtggcaccgaataaaagatgaatgatagactaccttttggaaaaaaaaaaa

SEQ ID NO: 1085 - DNA, 468 bp, Mus musculus
aactgaggattggagtcctgctgtgaaagaccctcaagccccagggatgagcaggaagactctctgggcacagcttctaaaggggatcctgcaggcggaatgcctggagtcctgagccctagaagagcgggcatttgtttggtgggctaacccatcacttctgactgctcctaacatgaggaggtcacagggacatccaactgcatctgtaagacagcttcccagcctgctttgtgggatcctctgcccagctgcagctgatggaatgaagagcctgaaacctgcttgctcaggggtggagcttcctgctcattcgttctgccacgcccactgctggaacctgcggagccacacacgtgcacctttctactggaccagagattattcggcgggaatcgggtcccctcccccttccttcataactagtgtcgcaacaataaaatttgagccttgatcagaaaaaaaaaa

SEQ ID NO: 1086 - DNA, 458 bp, Mus musculus
  misc_feature (1)...(458): n = A,T,C or G
aaatccctggacctcctacaaacgctagaccaacacctgccctcctccctgattctccctgttctgcaaccgctggggtgactgggccactcttgttccccaatgctgagccttcttattcagttggngnatcttcttctgaaagagccaagagttcgccttcagctgacaacagtttaacttgaaagtcaactctgtgtggatacggatgcatgcgaaggccagaggacaattgcagggtcttgctctctccttccattggggagatcatgggcattgacttcagantatcaagcttctcgacgagccctttacccaatgagccacctttntaaccacgaatcggtttttnttgatacaccancgatcgtgggcaggctggtgctgtgggttgaaagngaaaaggccccccctggctcaaggtttgaaagctaaggtctgagtttggggtgggaatt

SEQ ID NO: 1087 - DNA, 217 bp, Mus musculus
  misc_feature (1)...(217): n = A,T,C or G
agactgaggggggagagggctgaggcatagccngggcagangccagantgactgnttggggaactctcagaggattgaacaggaancanggcangggtggtatctgangagccacacangngcacnntttctactggaccacgagatgattnggccgggaatcaggcncccctcccacttncttcanaactggagnaacaacaataaaatttgagcc

SEQ ID NO: 1088 - DNA, 435 bp, Mus musculus
  misc_feature (1)...(435): n = A,T,C or G
gactgaggagtacactgtagctgtcttcagccacaccaggaagagagcatgggatcccattttgcagatggttgtgagtcaccatgtgactgctgagaattgaacttgaggcttctggaagagcagcagtcaatgctcttaaccgctgatcggtctctttagtcagtcccccaagcctccacccccgttttttctatgacaacaaaacagtatctttctgcactgttgactgggaaatgccttcatttggcaaaggggttaggacaaattgctcagagcagaaacgaaagcatacaggacttgngctacttctcttattgcaagctcaaactacttcagagcccagcagtctagtggctctagcaactgtggccttagtcacacactcagtcattgctgttttcaggaatacaaggacgaggggaaaaaaaaaaa

SEQ ID NO: 1089 - DNA, 353 bp, Mus musculus
  misc_feature (1)...(353): n = A,T,C or G
gatgaagacgtcagacttcctgctcctctgctgacattncccgcctgctacctgtgtgacctccagcacatacacgaccntcagcgttggtttcctcatctacagggttattnaaataggagtccactgagcacagagatagtatgtgantncagtccctcttgcttgataancnacntcaaaccngatcgaatttacaagaacttgatgcacgaganactaancngaanaaagcgtnntgcntntttgannggtccngacntnntgnatttntgtgaccatntaacatttctagantttcgttcncacnagacacactgtaagntgncttaacaacttgtacggggtgtcaa

SEQ ID NO: 1090 - DNA, 263 bp, Mus musculus
  misc_feature (1)...(263): n = A,T,C or G
gaactgagactgaaantgaagacagacaacctgagtcctacanagagcngtttctncggacctgctttctgnatttgtgngatggaaaccaanaacacctgcntcttactggagggagaaactgatcanggcanaaaccagacnctagcccttgatnaancagagtcagagcatgnttcattaaagcaagcangcaagcaagcaagcaagcaagcaagcangcaaataaacaagccatatattntgaacctgaaaaaaaaaaa

SEQ ID NO: 1091 - DNA, 183 bp, Mus musculus
  misc_feature (1)...(183): n = A,T,C or G
gaggacctacattcaattcctggcacctagaagggcagctcacaatgacctggaattccagctccaagacatccaatgccctcttctggactccatgggaactgcactcatatgtgcacaccgtcctttgncccacaagtacatccaatttaattaaaaattcttagctgggaaaaaaaaaaa

SEQ ID NO: 1092 - DNA, 123 bp, Mus musculus
ggaccttccctttaattctgcaggaagcctagaccttgctgattctggctgacccatagaaagatgtatagggcattttaaaaaagtaaataaatattcttaagccaatcttaaaaaaaaaaa

SEQ ID NO: 1093 - DNA, 137 bp, Mus musculus
  misc_feature (1)...(137): n = A,T,C or G
gactgagataacatgtggatgactgaagtacaagccaactagganaacactgcagattgttgagaatcaagtaggaaaattctacaggagangattctgtggtcttgagaaactggaaacaatgagaaatggttgta

SEQ ID NO: 1094 - DNA, 246 bp, Mus musculus
ttccctggagcttggacgtgaacatccccgtctgagatcagaacggttgtgcttccatagtcacgtgggtggaggaggtgccaggttcctgaggcacacagaaaactcctcagaggcctctctacctcagagcttgcaaacgagatgaacaacataggagttgggacttaaggtgttatagctgccacggggttccccatgcttctctaaacaatgttaataaactcatctaataaagagaaaaaa

SEQ ID NO: 1095 - DNA, 145 bp, Mus musculus
  misc_feature (1)...(145): n = A,T,C or G
cccaggctggtccttgaactgattctcctgctgacctttcccaagtgctgggattacagacatgtgacctgctccagcttttgaggctctgatcgatggngatggttgtacangtagaggcnancaagggctctgttgttagaaa

SEQ ID NO: 1096 - DNA, 118 bp, Mus musculus
  misc_feature (1)...(118): n = A,T,C or G
caggtgcgggtgagtaccttgctcctttccattcttgtgttgtttgctactgccccctantggacacagttgcattaatggctaacatggggggaaaaaatcacaggtaaaaaaagaa

SEQ ID NO: 1097 - DNA, 121 bp, Mus musculus
  misc_feature (1)...(121): n = A,T,C or G
cacatgcaggtattatggacntccatncncacgccgttagggncngacagatttcttggcctnaatcaatatagcacnacagtngacaggntntgaagtcctgacctaaagcaaaacacat

SEQ ID NO: 1098 - DNA, 130 bp, Mus musculus
  misc_feature (1)...(130): n = A,T,C or G
gactgaggccttgggncgttgcacttgctgctgcctctgctcggaatgtaccctgggctncaaaggctcaagntaagagcctctnctctgnntcntatnattagnagtggtcnttagcctcatgccctct

SEQ ID NO: 1099 - DNA, 224 bp, Mus musculus
  misc_feature (1)...(224): n = A,T,C or G
gactgaggtggggtctttnctggaaatgtccaagaactcacagcaagtgggaggtgagaagcagaggaggcccttctgaacttttggatccttccatccgtctgtctgcccatatctgtctgtggactctaactggccggtaggggagaaaggtggtttatatggatttattcccagatcagcctctgttataaaggactacagtgccgctggaaaaaaaaaaa

SEQ ID NO: 1100 - DNA, 476 bp, Mus musculus
gaactgagaaaatgaagacggaggaggaagaagaggaggagaagaaaaactgagacatccatgatgtctgcctaggatatgggtacatcgcgctgacacacggacagctgccgccatcttgcctgaggatttgcctgccgtggcaagactcacagagtacatcggttagacaccagttgggcttcactgttctggcctttgggtcaagtgcgggtccttttgaaaagctttcttaacttctaacacctccgtaaaagccatgtgacaaacagggctggagtgctctctggctgctctgccaggctcagttcccagcacccatgtatgcggtggcactcacaactgcagccccagccccgggagagccatcgccctctctgacctcctcagacaccaaatgcacgtgtagcacaaatatatacacacatgcaaaacacccatataataaaagaatctttcttacttaaaaaaaaaaa

SEQ ID NO: 1101 - DNA, 516 bp, Mus musculus
  misc_feature (1)...(516): n = A,T,C or G
gactgagctctcagagcctgaagtaaatcagggtggacctgcaataaatcagatatgacctcaaagaagaagctgtctggaaggcttgtcagcgcttgtcaggatttcactgaagaaatgtcttccagaggctgcggaaacggctcagtagaaaatctaaagctctttgagatgaagatgatgaaggngaactgngggaagttcagtgttcttggctgtagttgcaagaaaatgcaccaaaggacctcttttgattaacatcaccaccaggcagattgaaaattgaagataaaaaagaattatctaaagagtctttctttgtgtgtcatggaagatgtatgncaccgaggaactgggaatcagagtgtctgtcacgtcttccatttgattaatagtnggacacaggattttttcaatatacaaactcganagtgttttgcaaagtaccctcaatagcagatttaaaatcagccatatttccattgatgagtgcttactatgaccccaagtattttg

SEQ ID NO: 1102 - DNA, 168 bp, Mus musculus
  misc_feature (1)...(168): n = A,T,C or G
cagcgagtggcttttaaggacagcagcagcagcaggtncgtgtggagtccacgatntcaaaagannttcncatttaaaatgacattcaacctttncantctgatattntaataagntccngctgccatggaggcacctgcctatnccttcnntgctctagagtccgga

SEQ ID NO: 1103 - DNA, 342 bp, Mus musculus
  misc_feature (1)...(342): n = A,T,C or G
gactgaggagaagcatagcctgggccgnatggnttctgatcancccagtacgtatgtgcatcactctctgngcctcgnattctgnantggagagaatgacttactgatggtgtagggacgctgaggatgcgtggagtagctgnggaccatgggtgaattactagcttgcaaagcctcactggaagacatattctcttctggcccgaagctcaggcaggatcatctttgaccagaactactgaggacaggacccagaatctgccatcagccaccacctcatccccattttgtctggagctcagtgtgtgtgtgtgtgtgtgtgtgtgcccccaccaaacacac

SEQ ID NO: 1104 - DNA, 145 bp, Mus musculus
  misc_feature (1)...(145): n = A,T,C or G
cactcttctccagtcagatntgnagatttttacaacantnccaaggnccataggcganggattctccttgaagtatggngacaagntaagagagggcctnaagtctacnngatngctcannatgtaaaagtgccaccaagcctga

SEQ ID NO: 1105 - DNA, 194 bp, Mus musculus
  misc_feature (1)...(194): n = A,T,C or G
agagatgtatcgcccgtacccggccttgnacncgaccgagtttcannaactgntcctgactactacaggacagtttntgcngacngaggcgaggcccngaggccgaagcccttccgacatctctagcgacgnctccattcagatgacgcaaaattacccccccggncatcaagtacccggaccattctccacat

SEQ ID NO: 1106 - DNA, 249 bp, Mus musculus
  misc_feature (1)...(249): n = A,T,C or G
gactgaggtggggtctttcaggagcttcanancaaggctgatggaggtgagaggagccgnnaaggacagactgangacccacccagacgggaatggtgcantcgntctcnctccagntctatagactgattcannattacacccggnaactgagagaccggntgggagggccgaaatanaaggaagagggggtgtgtgggtanggagtggnnggngtcctatnatcttngttnttagcactagacggac

SEQ ID NO: 1107 - DNA, 511 bp, Mus musculus
  misc_feature (1)...(511): n = A,T,C or G
acacatgctctgccactgannaatgcatntctatagctttcccagaggctctggagctaggtcaantctaagaaccattcaaccatcacagaagtnacnggtngnacagntngtgcaactncaaaagcagctccgncttgtctaagcagtaccancttcaatgcttncataggctggccttaacttgctaaataaccaaggatgaacttagattntggccttaactngctaantaaccaaggatgaccttngtggagagcagnaccgngagcaatcncgtgcatgccgtgagcaatcgccattataagatggcgctggcttncactgcgcctaactagtaaacaagccttatgcncaagtgcaagagtgaactcacgactattcactgcacatctaggaggaggngtaggaatggggtgatgggcgagcaacgaatcaggagctgtcacgccacatcaggtgctgaaacgtcatgctgagggctatatangcagcccccccccccaaaaaa

SEQ ID NO: 1108 - DNA, 462 bp, Mus musculus
  misc_feature (1)...(462): n = A,T,C or G
agcaggagctggggagaaggtgaaggcttgccatggtcaagctggcccaagccattccagggactatctttcgttnctattgctgtgataaaacaccatgaccaaaggcaaggtggaaaaggaangnnttattnnacctgnacaacncttggttnactccatctactagagaggatttgaggcataatcttnnggnncancacnngnngggaggaactggaagacatagggcngggngaanactgctcttactgncntgatnctnatggnttgtcnangctgctttntcatacaactcaggaccaccccgcagtngggccagaggtgcaccacccgtctgtaactccagcttcaggggataatctgatacctctttttggctccaagaacagcaggcatatacacataaatgcaggcaaaacattcatacgtggaaaanaattaaatcatatatatgtgggc

SEQ ID NO: 1109 - DNA, 131 bp, Mus musculus
  misc_feature (1)...(131): n = A,T,C or G
ctgacgaacgctggttcnatgcacttggccggtggcccttgngcttcncttagcttanntttgcttacntgaagnctganccnttctgcttatcatgcaaggcaatgcacntatcatccatgtaaaaaaaa

SEQ ID NO: 1110 - DNA, 172 bp, Mus musculus
  misc_feature (1)...(172): n = A,T,C or G
tggggaactctcagaggacggacaggnancatggcatggctccatatatgtanngcctcnantcgcagaattcgaagctgggnccccgngnatcgaaggtcctatnnggaagctcctattntctagaaagtnnggaacttctcgacctgcaggcgctgcaggctgggggggg

SEQ ID NO: 1111 - DNA, 278 bp, Mus musculus
  misc_feature (1)...(278): n = A,T,C or G
tccggattaaccggggcactctncaccctcggggccgaagaaggcccgcctncggaacccacggccgcacacaagccgncacggtgcgcaacagccgcacctccccttccgcgtcagcgcccgccccacgccgcgtcatcagcacctcggncaccgcggcctgcgcttcgcttccgtacattctacacgaagcccagtctccaactccctaaattccttcccaaacccttttttttctcctaaaaggctttaaaattaatcatatgatttatttctgg

SEQ ID NO: 1112 - DNA, 210 bp, Mus musculus
gactgagactttacgtaaaattctatgggcttctgtggccaggtatcggtggcacaccccttaccctagcactcaggaggcagagtctggtggatttctgagtttgaggccagactctggtctgcagaatgcgttccgagccagccagagttacacattgagatcctgtctccaaaacaaataaagagccagaaatgtaaaaaagaaaaa

SEQ ID NO: 1113 - DNA, 183 bp, Mus musculus
  misc_feature (1)...(183): n = A,T,C or G
ccttcacagtttgcagctcgagtgtcctgtcctgtgcttgtgccagtccctgagcaaaccntgtcatgtctgtacaaannccccncntcaccacgaggttanaagactttattatttncgnctgctgtgggnncatggaaggggtcatatgtgangccatcacatttccttgggcactaaaca

SEQ ID NO: 1114 - DNA, 270 bp, Mus musculus
  misc_feature (1)...(270): n = A,T,C or G
gactgaggggccctctatttagaaagaaagaaagagagaagagaagagaagagaagagaagagaagagaagagaagagaagagaagagaagagaagagaagagaagaganntgnngngangactccngacattgatggtgatggtgcacatgtttagtatcagcactcttggaggcagagacaaaaagatctttgagtgcaagactagcctggtctacaaagcaagttccagaactaaacagagaaaccctgccttgaaaaaaacaaata

SEQ ID NO: 1115 - DNA, 255 bp, Mus musculus
  misc_feature (1)...(255): n = A,T,C or G
tgacatttgcatcatgnagatcatcctgaaatggacntaagaagactcagntcnnaaanggaccttanccaantggacatgatncatactactnnnggncaagcaggctggaaggaggtttacttgngaangatcnctccaaggtcatcatacatttctatctcccagttcatgtttgtatcttcctggaacactccataaattcaattgacagaggaaataaaaattaaggccttttttccccaaaaaaaaaaa

SEQ ID NO: 1116 - DNA, 189 bp, Mus musculus
tgagaggacctacattcaattcctggcacctagtaagggcagctcacaatgacctggaattccagctccaagacatccaatgccctcttctggactccatgggaattgcactcatatgtgcacaccgtcctttgccccacaagtacatccaatttaattaaaaattcttagctgggtgaaaaaaaaaaa

SEQ ID NO: 1117 - DNA, 200 bp, Mus musculus
gaactgagggggaagacacaatggaggactggagagatggctcagaggttaagagcaccggtcaatggatcccagaagacttgagtttgattcctggaacctacatggcacatgatcgctgtgactccaactccaggggaatcttacatccccggcgggaccctgtctcaataacagcagtgatgtcttaaaaaaaaaaa

SEQ ID NO: 1118 - DNA, 154 bp, Mus musculus
  misc_feature (1)...(154): n = A,T,C or G
tattccaagcagatctactcagacggntccagatagcaggtgaancntgccatgaacaantcatttatnggagtntgnnggntcagactttgatttccanntggtcctgatngtaagtaaaangaangtatgaaatcaaccctaccgatgatat

SEQ ID NO: 1119 - DNA, 162 bp, Mus musculus
  misc_feature (1)...(162): n = A,T,C or G
gactgaggatttctctgtgnagnccttgctgtcctanacacactctgtncaccaggctgnnttnaaactcagcagatncgnctgnctctgcctcccgagtgctgggattacaggcatgtgcaaccactgcccgtcttgaataaatctttaaacaaaaacaaa

SEQ ID NO: 1120 - DNA, 457 bp, Mus musculus
  misc_feature (1)...(457): n = A,T,C or G
ccggaccagactgagggccctgtgccatcntgctcactnntnatggnnntnacgcntanttgggnngntntcaacagccntgtganacacaacctncnanntntcccatctttaccaaagacttcaatgaaacacagtccagtgatgctcctgagctgggatatggtctgggtcttctggctgcctgcacagggctctatgggcgaaagggtctctgactcggaagtcccctgagtgagtggtctttttcatggtaccgatataatttgtggtcagtgactgattgactcatttgtagctttaagaataggacatgtaaaccgggcgtggtggcgcacgcctttaatcccagcactcggaggcagaggcaggcagatttctgagttcgaggtcagccagagtgagttctaggacagccagggctgtacagagaaaccctgtctcaaggaaaaaaaaa

SEQ ID NO: 1121 - DNA, 233 bp, Mus musculus
  misc_feature (1)...(233): n = A,T,C or G
gactgaggttcctagctcctcgtcttcaaatgtgaggctacaacatatacagattaaaaacgaacctgcaggaaacagccatcaaagagaggatgccncagtctcanctaggnctagaganccanaananaccttgncctcttgctgncttcctgcctccatnagctcactgctganatggtggacatagtnctggcatattcagtnttaaaggcagctagagattgagccga

SEQ ID NO: 1122 - DNA, 152 bp, Mus musculus
  misc_feature (1)...(152): n = A,T,C or G
ctcagctacctctccatcaccacgtctacctgcgtgccaccttgtttcctgccatgataacaatggactaaaaacctctgaactgtcaatcctagttaaatgcttncttttataanagaccncatgaggacatggcggctattcacagaact

SEQ ID NO: 1123 - DNA, 251 bp, Mus musculus
gttctacatcttcatctgaaggctgctagcagaatactggcttccaggcagctaggatggtggccttaaagcccacaccaacaatggcacacctactccaacaaggccacaaaccatcacaatatgtattatatgtatgtatatatgtgttatatgcatatattgtgtatatatgtattattatatatatataatacttacatataatatatgtaataaatgtataagtgcattaaatattaaaaaaaaaa

SEQ ID NO: 1124 - DNA, 408 bp, Mus musculus
  misc_feature (1)...(408): n = A,T,C or G
gaactgagacaagcaacaagtggctcctggncaaggctgcggctatggcaggggcggctctaagctccacagttcctcttcccctggtcttcctgccagccctctcgatgactccattcttctgaggtcttctgaggactgccctgtggcaccagttctacctcccgaaggtacttaagcaaggctgtcacctctaccacaaaaggtccatttcctgggcagggcctggtgactcataatcctagcacttgggaagtggtagcagaagaaaattcaagattagcttcagttttatagtgagacaggctagcctaggctactgaggctagcctgggctgcatgagagcctgtcccaaacaaacaaacaaacaaacaataaagaagcctcatttcccttaaaaaaaaaaa

SEQ ID NO: 1125 - DNA, 274 bp, Mus musculus
  misc_feature (1)...(274): n = A,T,C or G
gaactgaggtggggtctttnagataaatgtaaaagaaaatgaaatccacacagccacaagataactgagatgattccatcagggggcgtggagagatggctcagcagtcgagagcactgactgctcttccaaagatcctgatttccatccccagcaaccacctataatgggatctgatgccctcttctagtgtgtgtctgaagacagcgacggtgtactcatataaataaggaataaatcaataaatcttgaaaggagatgttttcatcactta

SEQ ID NO: 1126 - DNA, 150 bp, Mus musculus
  misc_feature (1)...(150): n = A,T,C or G
cattcttatagagtgtgtcccgaagacagactgcagtagtactcntatnantangagnangncttnacnctngccatgctctcaanatgcctgcggcctcgttttctttctggcttcgcaatcttaattttataaccgtaaaaaaaaaaa

SEQ ID NO: 1127 - DNA, 375 bp, Mus musculus
  misc_feature (1)...(375): n = A,T,C or G
gaactgaggtttttcttcccgtgaagagncaagaggactactgaagctcttataaagaaaagcatttaatttgggctggcttacaattcagagctttaatccattattgtcatggtaggaaacatggcagcacacaagcagacatggtgctggagataaatagccaaaagttctttctacatcttcgtctgcaggcagcaggaagtttgagagacagtgggtctggcttgagcatttgcaacctcaaagaccccaccccacccctgtgacacacttccttcaacaagccacacctaatagccattcccaggtgactaagcatttaaatctctgagccacagtataacttcaataaattccttgaaatttgactta

SEQ ID NO: 1128 - DNA, 129 bp, Mus musculus
  misc_feature (1)...(129): n = A,T,C or G
gaactgagatagttttcttccnagctaatggtgcanactacctctgcaattagaagaacacaagatgacatgggaagaaactgggttcttttaaggacttccaatnnacccctacttaaaatcaaaaaa

SEQ ID NO: 1129 - DNA, 390 bp, Mus musculus
  misc_feature (1)...(390): n = A,T,C or G
acaccgaatgacacaggccttgattaatattggactcggcagaccttgaatggattctactgactgncaaggagnaaccgnacatgctattntttgngnacaaagaataaaaatatcgaanaacttttaaganantaaattnatgnaccangtcatctggatgtncangaattnggganctnntacaatgacctccccacaggcccatgggccccctctgttcccaagncctccatgcaaatgatgncaaggatgcctggggagtcaggctacatcttaggctgaagtnttcctacccctgagcagngtgtaagagtgcttnctgtgancccattaacctngacagcnaggcanaggggtaaatgcnaatctagggctccacactttcat

SEQ ID NO: 1130 - DNA, 256 bp, Mus musculus
  misc_feature (1)...(256): n = A,T,C or G
tgcctgagttcttggaagacccatacctaatgatgaataggttgcttanaggccctaccccgaaaaagaaagtcaagaaaactataagagacacatctacaaacctccaactaggggatttactctttcactgaaagctggggtgtgcctgtcttctctggtcaatcttgactctccaggagcatgttaaatgcactctgacatggtgccaccaccgtgaacaataaatgacgaacctgacacccaaaaaaaaaaa

SEQ ID NO: 1131 - DNA, 510 bp, Mus musculus
  misc_feature (1)...(510): n = A,T,C or G
gaactgagactgaagcatgtggtcctctgagaactccctgatcagctgactcagacagatacagacgctcacagccaaacagngatggaacttggggattcttgtggaagaatagtaagaaggatttcaggccctgaaggggataggaactccacaggaagaccaacnagagtcaactaacctggaccctnggggctntcagagtctgaaccaccaactaaagaaaatactttgggctggaccttgtgcagcttgaccttcatgtgggtcctaagcaactgcaacagagacgatcncaaaagctgttgccctatacatggtatatattcttntagctgggctgctttgtcnggccccaagagggagaggaagngcccttgcctttncagagacttgatggacccttgggnggggggaaaaagccgnggggggagtcccncacccttactggaaaagaaaggggagaagggaaagggggaaaggacctatttggaaggaggtgaactgggg

SEQ ID NO: 1132 - DNA, 513 bp, Mus musculus
  misc_feature (1)...(513): n = A,T,C or G
atttgaggtctctcattgaacccaggtnctcaccacttggcaggctggctggtcagcaggccctgggaatccacctgtctccacttccccagtgctgaggtgacaagcaagcactgcctcatttggcttcacacatgggcactaggcacagaactcaggtcttcatgcttgcacggaggcatccattcacagcgggagcagcagattcggttactgcctcacgttcttcctccatttgaggctttgtttcctgttacctggaggcagctcagcacccaactaggtttctggctcactatggaaggcccctacaaagagatgagagagaacccgcagagctccaccagcatcagccacaacaaaacaaccccaatctctaggggcaggtaactctctctgtttgtggtcctcaagtgcaagcaactatcaactgtggtgagggtttatttaaatgcacacacctaatttcgtcattccttggacacaacaccaaccaccaagttgctgagttcc

SEQ ID NO: 1133 - DNA, 228 bp, Mus musculus
  misc_feature (1)...(228): n = A,T,C or G
attttggtgctactctcngactgaggcttcnttactgtcanccatnccantggttgcgcacctcgtctgcggacngctgancttnctgacattctntcaaantctcaccgnactgntccaaggtgtctactttncagccctgaccagtntgctgtcccaganagtacagaganagcgagagagcctttacctacagcactgtgggtgctggctcccaggtcggtgaag

SEQ ID NO: 1134 - DNA, 284 bp, Mus musculus
gaggtgcatcacctttgaccttgccctttgacctttggccttggctcttgtgagacctgcaaaggtgcactaggatccagatacagataacgggcctggagagatggctcagcagttaagaacactgactgctcttccagaggtcctgagttcaatccccagcacccacatggtggctcacaaccatctataacgggattggatgccctcttctggagtctgaagacagctacagtgtactcacatacataagataaataaatctttttttttaaaaaaaaaaa

SEQ ID NO: 1135 - DNA, 483 bp, Mus musculus
  misc_feature (1)...(483): n = A,T,C or G
aactgaggtgacactgtgtnggacaagaanggtncacctctctggactaccngannggactgtntggngntnactgttgccctntgaacangctaggnaagcactctgcagccaagctacaaccccagtcctcttctcacttttaatnttaggacaggctcntcttgccaaggncgcctatgctgcccttgaactcaggcccagtctaggctttgaacttggagtcactntgcttcagcctatctaagtagcttacacgatctgcgcccccaagcctgacttggntagaattgantgattgactatnccgtagtttgggagcagtgctgatgtcctgtgaaangcatgtggaagtcagaagacaattcangggagccgggnctatccttccagcacgcgggacctgggggctgggctgaggtcatccggctcgnggcaagggactctacccactgaaccatcctgctgacttaaaaaaaaaaa

SEQ ID NO: 1136 - DNA, 269 bp, Mus musculus
  misc_feature (1)...(269): n = A,T,C or G
ttcatgactacagccaccaccaccnacatgaanngnntgtgctctaaactactggntcacaaacttctggaggaaaacttatttttctaagntttgtaaaaagatagctgncagtgcactgaactagccccaaaattatattttacagtgtgnanatgtgtgtatactattgagtgtgtgtatatgngngtgngnntatacatatatatgtntngntcctctnaagaatctnggagaataaagttgacattcaagttcaaatcccaaaa

SEQ ID NO: 1137 - DNA, 104 bp, Mus musculus
  misc_feature (1)...(104): n = A,T,C or G
ctgtgtaccatttttagaagccagaanatggtgttggatggatcctctggaactggattnataggnggctgtgagtacatacctgatatgggtactgagaacta

SEQ ID NO: 1138 - DNA, 158 bp, Mus musculus
gactgaggttctcacctgtcctggacatgcttcatacatagactggtttgtccttgaatgtccttgaactcagagaaccacctgtctgtctctgcctcctacgtactaagattaaaggtctgcaccaccagccggtctgaagtgacagacaaaaagta

SEQ ID NO: 1139 - DNA, 154 bp, Mus musculus
  misc_feature (1)...(154): n = A,T,C or G
gaactgaggaccctactgtggacatgantcngcaatgccnactgaggncttntggnagccatgtcagacgaatccgnctcatngagcagatccagacctggacccggacgtggagctggaggatgaggaagaggaggaggaggaggaggcttta

SEQ ID NO: 1140 - DNA, 147 bp, Mus musculus
ccccagccctgcctggcccaggaatcttctctcaactcctcgtgcagctccaatgctctctccttccagctcctttttttggattttttccactccttcctgccccaggatccttgcacatgacatttgctctgtcaaaaaaaaaaa

SEQ ID NO: 1141 - DNA, 363 bp, Mus musculus
  misc_feature (1)...(363): n = A,T,C or G
gcgattggcagagccaagaacttcnttgaanagggntatcctnaacannngcagggctanagnagagctcncaagacgtcgnagttncnctttcccnaancttggcnnctgntgctgactatcanagttcgnacagttcntttggagaccactcctgcttccttttaacaagggnaaacaaaacgatctgaggaacgncctgagcgncagncctcagnggagatggggggactttcttttgaatctnatttttccctcccacaaaacagacngattgacaagagaattcagtccataggcggttgccaggaacctttcagnggntggtatttctggggngnnttaacagcccagatcccacct

SEQ ID NO: 1142 - DNA, 176 bp, Mus musculus
  misc_feature (1)...(176): n = A,T,C or G
agactgagaacaaagtagcacaccctgcacattacccctcttgaaattcnttatgagatnaattngttnctcnntagttcaccnaggttnncnccttctcactaggccctagccagagctttcttcnttttgcttgntgagtngantaaaattcgagagggctgcaaaaaaaaaaa

SEQ ID NO: 1143 - DNA, 332 bp, Mus musculus
  misc_feature (1)...(332): n = A,T,C or G
gactgagcctgtcactgcagagactttcaaccgcccagccctggctgactccatcaagcagtcaaacctccagaagcgatgcctgaccagatcttgctcctgatgcctgaaggctcctgccatttgtgatgcaaacaatagtcattccagccctacgacttgncagaaccccctcctacgatctgcattatagcagcaaacaaaatggacgaaanagaaagcctgtcttcagagagcttgtattcaaggctaacaaacttccttactatcatttactgtgcggctgaggacccaaataaaacctcatcttccttagcatgacaaaaaaaaaa

SEQ ID NO: 1144 - DNA, 136 bp, Mus musculus
catgggtttcccatgttgcagctcacaactgtccataaccccagtgtcaggaaaaccgatatcctcttctggacaccaggtatgtatgtagtgcacaggtatacactcgggcaaaacactcataaaattaaaaaaa

SEQ ID NO: 1145 - DNA, 251 bp, Mus musculus
  misc_feature (1)...(251): n = A,T,C or G
gactgaggtgctcccctctgtccatagcttcgaggactgtcaggagagattaaagatggcctgagataagttggctctgaacttgcaacattccaacctctccacattggttgatcagnctcctcgcagaaggttcaacttgaaaaagcaactcctttctgggaaatttcgngcatattccccaagaactgtcaaaacctaattganataggcatacatttacatgaaatgtagaagtcaaaaagaaaaaa

SEQ ID NO: 1146 - DNA, 160 bp, Mus musculus
  misc_feature (1)...(160): n = A,T,C or G
tgagactgagggagaggaatagtaggatattctgncaacaaccattctctgagctctcaccactgtgccaggcctagctgccacagcagacgcagagacaaaagacatgagacattggaacttcaggccctggggcctacctgagagaacaataaaaaaa

SEQ ID NO: 1147 - DNA, 192 bp, Mus musculus
  misc_feature (1)...(192): n = A,T,C or G
gaactgagaggacctacattcaattcgtggcacctagaagggcagctcacaatgacctggaattccagctccaagacatccaatgccctcttctggactccatgggaactgcactcatatgtgcacacctgtccttagccccacaagtacatccaatttaattaacaattcntagntgggaaaagaaaaacc

SEQ ID NO: 1148 - DNA, 176 bp, Mus musculus
  misc_feature (1)...(176): n = A,T,C or G
gtgctggctcaacactncccatcangangagggaaagcagagatctctnttgctccctgnaggctaccctggnntgagtngaccctcaaaggcaccatntncacagntcttaaggaaagcagnccaaagaagaaagttntaangatggaattaagtccggtagaaaacaagcgaga

SEQ ID NO: 1149 - DNA, 122 bp, Mus musculus
  misc_feature (1)...(122): n = A,T,C or G
ccaaccaagtgctacccactgagatgcattgcgcagagctgatttaagaattcantcttaggtatcacattgnatttcccatgactataattaantggaggacagctcatggaatgcctgga

SEQ ID NO: 1150 - DNA, 200 bp, Mus musculus
tgacttaccctcacattgggcaagaaccgggcagctgtacctaaatgacagagcaaaagcatctttcacgcatctgcagtcatagccgcaggctgctgggtcagagggtttacagcaccccaggggactcttctcataatgaaactgcttcaaggaagaattcactcagtttcgcccacaacctaaacatgactcggacg

SEQ ID NO: 1151 - DNA, 126 bp, Mus musculus
  misc_feature (1)...(126): n = A,T,C or G
tgaaaaaaaggcttagctcgggaagcttgcgnttgaagaagaacctgttagggttgaaggtgccattcagggtgaagcacttgcctagaaacgtttaacccccagcacctgttaaaataaactgca

SEQ ID NO: 1152 - DNA, 215 bp, Mus musculus
  misc_feature (1)...(215): n = A,T,C or G
gactgagcataggaaggtttcccaaggaaacactgtcaacagtgctgagttncgnccacccacttcctcagccatnttttactttgaaaaccgaagagaatgtcatangcctccttatcgtccagaatttnacttcattgccagttcggtgtgtccagatgtgcatacctccttatatgcatagcttgagactagaccgaaaaagaagaagaaga

SEQ ID NO: 1153 - DNA, 222 bp, Mus musculus
  misc_feature (1)...(222): n = A,T,C or G
ctgagactgagtaacaccaggagaggcatcanacccattgcagatggttgtgacccaacatgtggttgctgggaattgaacctaggtcttctggaacaaccagtgctcttaaccactgagccatctctcctgcccttgaactactttcttgcttacagtggttttcccggtccccaaagccttccagggcagctcagattcacatcctcttaaaaaaaaaaa

SEQ ID NO: 1154 - DNA, 213 bp, Mus musculus
ctgagactgagggagtgaacaagtccgcataagtgccttgctttaattacatttactgtggctttcctgtggacgtcagaagacaacgcacggaagtccgttctctccttccatcacgtgggagactgaaccaggttatcaggcttggtggcaagcaaaacacttgtacattaaataaataaatctttgtagaatctgccttaaaaaaaaaaa

SEQ ID NO: 1155 - DNA, 290 bp, Mus musculus
gactgagacatcccaactttccctgcttggaccggtcactcatctgtggacattcccaaatcgctgccttttgtttgcaactgtgtctgggtcgaagtgtgtgtccggacttccttctttcagaccagaggcaccctggagacctcacctgcttaccagagtctctgctgtgcttctaggggttcgctcactcagcaccctttaaagctctaccgcacagagaactggaatcctacccccttagcatcctaggatgctcatttacataccttatagctgaaaaaaaaaaa

SEQ ID NO: 1156 - DNA, 253 bp, Mus musculus
  misc_feature (1)...(253): n = A,T,C or G
ggacacatgatgaaanntanttactcaggattccagcctctncagantaccttatgaaacanctnncctagngggactgagcaactnctatattcttgnactnnccntgcacanctgnccattgttgagganttgcnctgctgcacatatantgnaacatntgtggnaaatgttcgtgngacatttacatctacatgtatacttcttaacacacgtgcacaaacgngaacatgtacacacacatacatatcac

SEQ ID NO: 1157 - DNA, 714 bp, Mus musculus
  misc_feature (1)...(714): n = A,T,C or G
gacacatttctactctgcacgcatttctcatgactatctaggaggcctgaatgacaaggacctggattatacacaagacaagacatgaggaccatggtatcataacatccagaagaacacagctactctggtggcttcccctcctgtcacactgactatgagcacccctcagctttgcagccggacagctttggagcacggaagcatgagcactgcatgcacaggaagaggctgggtggtctctgagagctgtctgccctaggggctgggaaagcacaacaaacacgggatcctgctcctaaagcaagaagttaaacaactcaaacgagcttcaggaagtccctgaaactgaccagatgtcattaggccccctccttgccagaataagaagtaaaagctaaagagtccctggcatgctaaaggaagctgagctgcaatgaagactcctaatcaaagctgcaaagactcttaagatcagaccagctgcctggaagaagcagaaaccagctgagctgcctggtagaggattagaccacccgaggcaccgagaaaggattttcttcaaggggcagagctgcctacaagctgtgtgcagtatactccagggtttcctagctgnctctgagttatttctgctcctataagtaacccctgacccgtagcctgcaagtcacctcaataaaactcactgggttggccggaccaaaaaaaaaa

SEQ ID NO: 1158 - DNA, 257 bp, Mus musculus
  misc_feature (1)...(257): n = A,T,C or G
tttactcaattcttgaatgatggggaaaagcccagtccattgtgggtggngccatccctgagctggtgagcaagcaagccgttgggaacaaggcagtaggcagcatcttccatggcatctgcatcaggttcctgccttgactttcctcagtgatgaaagtgatgtggaagtgtaagccanatagaccctttcctctcccggntgtttgctcatanagtttcatcnaagcaatggttaccctaagacagactctaccg

SEQ ID NO: 1159 - DNA, 468 bp, Mus musculus
gaactgagttgacccgccatcatgaacagaagttgggacaggaactaaagcagaagccatgaaggaatgctgtttactggcttgctcctggaggcctgccttgtcatactgcccaggagtgacactactcacggggcctgaggcatcccacgtcaatcactaaccatgaaaatgccccggagtagactcctacagtctggtgtaggcatttcctcaggcaagtctcctattcccagatgtcacttagctgtgtgaagctgacagaagatagccagcacaatgcctttttgctatgtgattcggtagatggagcctggagtcctcttgacccacggagccaattcctgtgtttgccataaattattgaaccccttcagcaaccaccccctggcttttcacctccatacagctgttgttcccattcagataaatgcattattatgcctgattctaacaagtaaattacag

SEQ ID NO: 1160 - DNA, 333 bp, Mus musculus
  misc_feature (1)...(333): n = A,T,C or G
gaactgagggagtggcactacttggaggngcgggctngttggagnangtgncactatgggcgtnagctntaagagtctactcctggccggctggtngcaagtacctctgctancanccttcangtgaagangtaggaactctcagcgtcctcctgcaccattgcctcgcatctgatcgctcgccttgatcctgcctagatagatactgggactgaacctctnaacatgtaagccagccccanttaaattnttgtnctttataatgacaacaatattaanaccttgttctaaggactgatgtaaataaatgctggagtcacaaatgaaaaaaaa

SEQ ID NO: 1161 - DNA, 458 bp, Mus musculus
  misc_feature (1)...(458): n = A,T,C or G
ccttggaattgactacttcagcctnacnaaantgggganctatggctgccgccancatgagctctaagannnacattctgnanngcatagcannactgtcctctgngaanctctacctagcagctgactnaangagatgcntanacccacggccaaacagtgaatggagtttggngactcttatggaagggntgggggaacaatctgagggctccgaatgggataggaactctacgaaccactaaccaaanaacatactcattgaacctaggcctncccacacatatgtagcanatgtgcagctcagtgttcttgtgggttccccanaaattggagtggggggctgtctctaaagctgntgnctatttgnggaatacatccccctaactgagctgccttgtatggcttcagngggaaaggttacacctagncctgcananacttgatgtgccagggtt

SEQ ID NO: 1162 - DNA, 538 bp, Mus musculus
  misc_feature (1)...(538): n = A,T,C or G
acttgcttcctgcctttcctggtactgcagaggaggcctggccatctacaagctgcacacaccttgcatcagccttccttccggagagtcgttctcagacagtacccagaataacctgaggacctgaaggtgtctctccgtggactgtctggggccgaggcgtgagctgtagtgtacagtaggctcggctaaagtgagtgctttccatcgagggcatagcccctgacgtctcctgtaggcttgcctgctctgtcctctttataggccccgtgacccgggatcatgtgagcagtactctgaaggacagatgctgggtcacacttcttgactgcagtcaccctacagctttgattcacagatgctctgctgcaggctganagtgacccattcatttctcanattctagaangtgacctcttgngggcaggncatcgctgcactgtggcccaccaagcctagntttgctgcgacctntgcccaccacccatcctagcccagncctgtangaacttttgcacctgcccttctgcttctgacc

SEQ ID NO: 1163 - DNA, 192 bp, Mus musculus
  misc_feature (1)...(192): n = A,T,C or G
gaactgagaggacctacattnaantgctgacccctagaagggcggcngacaatgacctggaattccagctncaagacatncaatgccctcttctggactccatgggaactgcactcatatgngcacaccagtnctttgccccacaagtacatccaatttaantaaaaattcttagctggtaaaaaaaaagaa

SEQ ID NO: 1164 - DNA, 191 bp, Mus musculus
gaactgagaggacctacattcaattcctggcacctagaagggcagctcacaatgacctggaattccagctccaagacatccaatgccctcttctggactccatgggaactgcactcatatgtgcacaccgtcctttgccccacaagtacatccaatttaattaaaaattcttagctgggtaaaaaaaaaaa

SEQ ID NO: 1165 - DNA, 185 bp, Mus musculus
ctgagactgaggatgtgagacatgtgcctgggacatcaccttgttcctcttcatttgtaccgaggatgctacagtgaagcaccatctagaaacctgagactgatactggatcttggatttcagacttcccagcatccagaacagtgagaaataaagttatgtgctttatatcctaaaaaaaaaaa

SEQ ID NO: 1166 - DNA, 228 bp, Mus musculus
  misc_feature (1)...(228): n = A,T,C or G
gtcacacactcagattctgaggctcaagtaatgaggacttctcctgtcttcaaccccattcagtggctggcatgcccctggagagatggctcantgtttaagactgntcttctgaaggtcctgagttcaaatcccagnaaccacatggtggctcacaaacatncataacaagatctgactcactcttttggagtgnctgaagacagctacagtgtacttacatataat

SEQ ID NO: 1167 - DNA, 366 bp, Mus musculus
  misc_feature (1)...(366): n = A,T,C or G
gaactgagctttgcaggaggaatctgggaagaggaaacctcagttgagcaaatgcccccatcaggctggcctgtaggggacttcatgaattttcatgaatgatgtttggtgggaaagagcccattctactaggtcataggagggcatnagatcctctggaattgaagtaacagctgcttgtgagccaccatgtggatgctgaaaactgaacccaggtcctctgcaagagcaagaagcgttnttaaccactgagacatctctctagcactttaaacatctcttgtcacccttaaaggttccattaacccccccccntttttntcntttgtttctggatctgctnatttgacatttttcataactgca

SEQ ID NO: 1168 - DNA, 443 bp, Mus musculus
  misc_feature (1)...(443): n = A,T,C or G
gcagcttctgacccaagctctccacctgccagccncatcaaccagacaaaggncacctcccaattaaagaggatgctgangaatacttcttggntcagacttntggagtcaggacaggcanngntggctctacctccctgggcccagacataaggaacagtacttattgggggagtgggagggggnttgacacagctggagttatcacagagaaaggancttcagttgaggaaatgcctccatgagatccaactgtaaggcattttctcaattagtgatcaagagggaaggaccccttgtgggtgggaccatctctgggctggtagtcttgggtcctataagagagcaggctgancaagccaggggaaggaagcaagccagtaaagaacatccctccatggnctctgcatcagctcctgnttcatgccctgcttgagttccag

SEQ ID NO: 1169 - DNA, 155 bp, Mus musculus
  misc_feature (1)...(155): n = A,T,C or G
aggtcacaaccatccataantgcaattccnggacatctgctggcctnttgtaagcctccatacaccaggcntagtaagtggnacanagatatacatgttcacaatattctcatactcataagaatnaaactnctttaccactctaaccccttttt

SEQ ID NO: 1170 - DNA, 318 bp, Mus musculus
  misc_feature (1)...(318): n = A,T,C or G
gaactgaggcacttgagtatcagacagcataggctgtcccccagctgaggatcacactcatctcagagctcctcctgtctgtacagaaggaaagagagagcatggatacttaccactcagcccacgtgtgtgaagaaatggagggaggcgcttgcctcgttaggagacaatgtgaggaatcaaatgcccccaagcaccaaccctttgtttgtccccacattcctggtgctatgtcctctgcaggntgcttaacttccctgaaccctcgntgttgcgtctgccccaaactcaataaatatttacagatcaaaaaaaaaa

SEQ ID NO: 1171 - DNA, 160 bp, Mus musculus
  misc_feature (1)...(160): n = A,T,C or G
tctttctccagtgcccggactgcctgcctgcctgnctacctgntgctgntgccgccatgatggtcatggactctaaccttctagaactatgagtcccatattatacgctttcttttataaggggccttggncatgttgtcttatcacagaactatgaaaa

SEQ ID NO: 1172 - DNA, 365 bp, Mus musculus
  misc_feature (1)...(365): n = A,T,C or G
aactgagtgagattcgaggagacaccangcacggctgacagagcaagatgcagagggctgagcggaaacccttgatgttggccaagtctcctctctgctctgcgtattgactgacacccactggggcctcatcagaaggacagcgctaccgttgcacatgcccgatgtggagttggtcctctccttatatcgtgacaagggttccagaaatcaaactcagatcaccaggatcgttcagcagatggccttagccactgagccattttcctggcccagaaatccataaaaggccggttgtgtgtggagtatttcaatactagcccaccctctgtattaaattgaaagaaaatcttcaaaaaaaaaaa

SEQ ID NO: 1173 - DNA, 532 bp, Mus musculus
  misc_feature (1)...(532): n = A,T,C or G
gggaggcatctaaaggcnaccgtgactgcccctccactccttcataaacaatgggcanacagccgaaggagaaccagcgaancaagngtggaaaatcccccaatttacaatgtcaactgntnaatgagggagaagccggngtctgtgcccccgcgtgtccncccnctgggactgcaccccggggatnatggggnnganggangaattgatctcttngntctnaaactataaggncccatnanggntanggaattnttttcgctggcttnattttttttccaaacanaagtatggagacaccttttcattcacnttcttaatntannaaagaaaggggcttactggntgtggagggggctcttcaaccggtctggcaagaatgaantttgagganncagcttctcttnatgagatntcaatccntganccagngtgctatggctacctctgcngtttgtcacagggacaaccacccactgngtacctatgcccagactnttctncnttttgngagactttccgttttccctta

SEQ ID NO: 1174 - DNA, 139 bp, Mus musculus
gtctcctgggctgtctgggcctgagttccgcagcctcgacatctactccctcagaccaccttccctttcaacacccctgtttcctaatcttggaaatgacaggaataaacctgaaatgatggctctgtaaaaaaaaaaa

SEQ ID NO: 1175 - DNA, 338 bp, Mus musculus
gaactgagctctacaccacgtgtgttcaatgccttggagaccagacgaggacgctggatccctggaattggagttggcagcccccgtgtgtgtgtgctgagaattgaacccagatcttctgaaggagtagtcagtgctcttaactgccactgagacgtctctcctcagcgatgaggtagaggcagattagacttgagtataagagactatctttagtttggagttcacatctatacttattaagagagttattacttttacataaagtctctcatgtatggtatatttgccatgaacttttttcaattaaaagcgtatatttatcattaaaaaaaaaa

SEQ ID NO: 1176 - DNA, 367 bp, Mus musculus
  misc_feature (1)...(367): n = A,T,C or G
ccatcgtgagaagcttcatcctgcagcagatgggacaaaaaaatacagagacccacanntagacagcatgcnnagngagagaactgggaacctnagccctaaaaaaggntgtctncatcaaatccctcccctcagggctgaggaagaggaagtagaaagactgcaagagccnnagaggntgaagagaaggacctcttngaatnaaggcctanacacnntagnnnntgcncactcacnaganactggggcagtacgcnnagggtcttgcacacgttntgcaccaggatggggncctaatagctggtaggagaggtgggcacattccntcccccacaaccccccanncctaattctcccatttggaagc

SEQ ID NO: 1177 - DNA, 320 bp, Mus musculus
  misc_feature (1)...(320): n = A,T,C or G
cctgatgcttcacaggctcatgncnttgngtgnagccttgctgttncttctggatngagctgctgctgntggttcgngntggatattttgctatcaggaangacnacagacanggnagatnggaattgccccaaagaanaacttctaagcttgggcaggaggnggcacacgccttttatcatancactngggaggcagangcaggcagatttctgagttcaaggccagcctggtctacagagtgagttccaggacagccagggcgacacagagaaaccctgtctcgaaaaggaagaagaggaagaagaagaagaagaaga

SEQ ID NO: 1178 - DNA, 360 bp, Mus musculus
  misc_feature (1)...(360): n = A,T,C or G
cttaggccaatccaagagacctatgcaccacctnctatgctnnaataaagcttactgtcgcagatattgnatncctnnaaggncttttaggcggggtacaccaagatggttccaccacaagagaggctgctagctccaagcacgactcacaggtttgaagattncctcagagtggctggggccagaatctattgaaaggggaagagagggataagagctgcaaagacctganacagaggaaggccgggattgtggaactgctgcaggccccaactgctggaagaggtccatcnagagagctgntgcgagntcccgcctncatctgntgaagggcctgtaggantggctggagccaagctg

SEQ ID NO: 1179 - DNA, 175 bp, Mus musculus
gaactgaggtctccagcatccccttgacttccagcaatggatccacgcgtaatccttcgccgagggatcggttccccctactcctcgctttcatcctagcccccacttaacaccccccaagcaatctctcaacaagtatatttgctgaggaatttgaaaaatccaaaaaaaaaaa

SEQ ID NO: 1180 - DNA, 208 bp, Mus musculus
tgtgaaaaatcaagtctcaaactgaatctctgcgatggacagatgtgttatgaccaatgaaacccaaggatgaacactaacacaggcttgagttgccagatagaggccatgttttgttctctgccagattttatcaggattgaatgctaccactttggtacaaaataactgctgacactcaaaatctctatattcccttcaaaaaaaa

SEQ ID NO: 1181 - DNA, 468 bp, Mus musculus
  misc_feature (1)...(468): n = A,T,C or G
cattacgaccattcttnacggccaacagtaaactcctgganagnttttacccctcaccggaactnctactcaacagtgtctttaagaggttgattctttagggctaggcttataggnaggctctgtangtaaggcttangttcaatcaccagtaccatnangagctganagcaaacaaaccttncccaaacccaaacccaaacccanaccaaangcaaaccagcacannntnagtnngctgcanccnacaaaaatcccaaccccggctaatgttatttccttcttctctntcantcccaggactcactagggancccangctncttcctgagtgctgngattacatatatgagcttataannactgggntnggaatttttattcttttaaaacantaanctngnttcataattattccctncccttgaanatttttacaaaaatgcctngtngccatttacaaaaaaa

SEQ ID NO: 1182 - DNA, 242 bp, Mus musculus
  misc_feature (1)...(242): n = A,T,C or G
tgaggtgcactggaagtcttcgccccgagggcacgcttcctaaaatgtgggtccgcggggtagaagagcaggcagggagaaccagcgagcctccttgatattagctgaaagatctgcctnacatgcaaatctttcctacctttgaactgtgtcagcaaagcttccaccaggccaacattcaatcacaagattattatagtgagaaataaaaaccttccattacactttccaacaaaaaaaaa

SEQ ID NO: 1183 - DNA, 207 bp, Mus musculus
  misc_feature (1)...(207): n = A,T,C or G
acgtttcagtgcaccgtgagaacgtcgcattgantccgcngnncngntatntancncnatggggctccttttttagcgctattggctcatgcagagcanaacacacacccacncnncacatgcacggtacngaggccagcctggtctacagagtgagttccaggacagccaaggctacacagagaaaccctgtctcgaaaaaaaaaa

SEQ ID NO: 1184 - DNA, 240 bp, Mus musculus
  misc_feature (1)...(240): n = A,T,C or G
aactgaggtggggtctttcaccaggcangcaacactgtgacagacactgaggtgatgagccttaaagagccaacnaacaggtcaggctcagtggctcancnaaaggcatgcctgacaagnctcagttggatccctgggacccacattgtggatgaaganaaccaactatggccaaatnttgaaccccanctgtgtgtcagggcnctcatagntgccccagccctgcctaataaatagacg

SEQ ID NO: 1185 - DNA, 262 bp, Mus musculus
  misc_feature (1)...(262): n = A,T,C or G
gaactgaggatccaagcactttaaacaaaaaagcanngcaccaacnaaacacgtggcctttacaacgtctcctttccaaggagggtctccgaagcnctaaagtnctccctgatgtcngaanctgacccannnacacagaggctnaagggctggttacccatatactgntcggctaangcnatanccgattccaaccntntctaacnaaaggactttggagaagccaagcctatgggtaccccntnctggaggctgcacttgg

SEQ ID NO: 1186 - DNA, 396 bp, Mus musculus
  misc_feature (1)...(396): n = A,T,C or G
gactgagatcctggttgattgaatctgtcaattaagagcccgaatcggcagggattgtcagcacttctcttggccaccagtaatcaggaccgtggctaaattaacaaagaagaaatctagaacaagacagcactgacttcagttctgggcctggngtctgcagtttttctaaccttgcccttgacagtcaaaggacatgccacctacacaaaatctttctccttgagtcaagaaggaagtgagtctgacaataactcttccaatttaccagaagagaagcacttcccagaaaccactagtaagctgtgacttaactctctggctgaaaccgtgtgatttaggcatgattctattcaggacactaaaacaaatgaagctttctcattttttaaaaga

SEQ ID NO: 1187 - DNA, 490 bp, Mus musculus
gagcaagttctaagcaggtagcttcgtggtacagcacttgcacacgtgcctgaaacctggccacacatgctcacaaggaaaagacgaactggtgatatattattcctgatgctggccacagaagagatgaagtaagtactctcacacacagttcatgcacttcgatgcacttgcccagctctctcattacactggaggaagccagctgccgtgttgctagatcacccaggcagcctacagagatgctaactaacacacggataaagggctcccagccaacaccagtggaaactgaagttgcctgccaacagccacaccagagagcccagaagtcctcggcaagcctgaagctgtcaagaactgaagccaaactcttaactataacctcatgagagaaccatttccgagccagactcatgactgtaagaaaccagtgcatttgtttgtgttgttttaaactaaaaataaaagcactctaaattaaaaaaaa

SEQ ID NO: 1188 - DNA, 150 bp, Mus musculus
  misc_feature (1)...(150): n = A,T,C or G
actgaggcagaataactacctgcaaagggaggaangacaagggangcagatttcagctcancaganggcagaactttctaacatttagagctgtgcaacaganaggagcnggctgtactcctgagaggtacgtgagctgatactggaaca

SEQ ID NO: 1189 - DNA, 244 bp, Mus musculus
tgaggtagcatccaccgtcccgcccttcctgaccacggctcctggcccagggctggtggccaggaagcaccaaagacatacctgcctgaacccaggcttgagctgcacaccaagctcagtgattctggaaggccagctgccagtgttacatggagcaagtgttcggttctgaattctgtctccaagaacaacgctgataggtatccaatcaaataaattgacactttctccctaaaaaaaaaaa

SEQ ID NO: 1190 - DNA, 328 bp, Mus musculus
  misc_feature (1)...(328): n = A,T,C or G
aactgagacatccctatgcagcattcgtaggccttctggaggatcaagacttcaggcctcaccattgcacaagtccttgaactgctgagcaactctaataccctcacggtcaccctagcattttaaggggctggagagatggtgcagcagttaagagcactnacttcagaaggntctngagtntaaatnccagnagctncatgcgnggctnacnacgcntnccgcagtnagatntgacgtcctnttctgctgnntatgaaganaggnnncagngnacttagatataataataaataaatnnctttttaaaaaaacttaaaatagaaaa

SEQ ID NO: 1191 - DNA, 134 bp, Mus musculus
  misc_feature (1)...(134): n = A,T,C or G
catgggagacactgtggctgnnggagacatccncgacatgatntaaaggctgcctcaccctgccctgccttcttanggctgtcacaggactnnntacctgcctgctgnttcctnatgacatacagggcacaatg

SEQ ID NO: 1192 - DNA, 107 bp, Mus musculus
gaactgagggtcctgccttgggacgactatggctcctgctgaggatatggggcttaagatagttgagggttttaaatacaattgcataggatttttaaaaaaaaaaa

SEQ ID NO: 1193 - DNA, 142 bp, Mus musculus
agactgagtccttcaacttttgaggcgtcccaggcaattgtgatcacaggcctgtgtcaccagccaaggcaaggctcatagtctaactctactatgaagatttctcaaaattaaagtacatattctcgtggaaaaaaaaaaa

SEQ ID NO: 1194 - DNA, 296 bp, Mus musculus
aactgaggtgaaaaaataactctgcaactgccatgtttcttgaaagagacaaggaagggcccagatggtagtgttacgaaagctacggaccagaccacagctacgggacgacaacccgacaggcctcatggcgcttatgcatactgaagctcacagacaagtgcacacagactgggtcaaggcccgctgtgcttcagcgtctggcttgcaccaccggcgaaggacagctcgcactacgcttgcgcaatagccgcgcaccgcctccagcgcggccccgcccctcccaaaaaaaaaaa

SEQ ID NO: 1195 - DNA, 400 bp, Mus musculus
  misc_feature (1)...(400): n = A,T,C or G
caactggaagcctacatacggacatggnaaaagaagctnntgctccttgcctgctcgcccttgcctggatagcacagtacattccctcactgcattggcgcctactgnttcaggattccagcacgcaccgaagaccagctgagacatncagccctggaggactgaacaattactgngattcttggactttacactcacagctagctactggtggactagcnggactgcagnctgtgggacnttncnatnnnctancncatanggtggtcaagaanacnactnnagaggaccttatgctnaataangnaacantatgcttgctagctncatagcaccagagaaccccttggcagntcacaaaggnntntgctacaaaagaataaaccaggggctggagaga

SEQ ID NO: 1196 - DNA, 344 bp, Mus musculus
  misc_feature (1)...(344): n = A,T,C or G
gaactgagctccagtgtcctttctgcggacgccgggctccaggactctcctctattgccagcgtagacgtgttccaagagctgagtcgaggtgcctcgnacaggcggagcccgcatcaatcaacccactcccgtgggtttccaccagggggcgcgaggactctgcgaccatcagtgtgtccaccgggaggcgctgcagcccgcctcgggctgtcgcgcggtgcggagtgccacccataaattagccccgcctggcttgggcgaggcaggatagcattatttgcataatcttgaaagagccttccttactggttagggtataaaagaccaatacgaaaaaaaaaa

SEQ ID NO: 1197 - DNA, 378 bp, Mus musculus
gttggaaactgctgccatcattattatgatttaatcctggccgttggttgaggtgctgcatagagaacgcttcacagtccactgcagacttgagaagtcattatttcctggaaggaaccacagatcacctcgatgagctgactccacaccagtctctggcatggctggcacacgctggcaagccacaggataagccagaaacatcctctttgcttgatggctcctggagcagaacagaaactctaaaagacagtataaatatctttactaattatgtaatacatatttcacataaggcattgccgctcatctatattccccggggccccatatttaaaatatgaatttataaaatctatctccactcaaaaaaaaaaa

SEQ ID NO: 1198 - DNA, 103 bp, Mus musculus
  misc_feature (1)...(103): n = A,T,C or G
ctgaggtccggaggcagcaggangaagacntgcgtaagngcnaggccagctctagtntacatagcgagtngcccagactatgnttctctccagccagaattac

SEQ ID NO: 1199 - DNA, 164 bp, Mus musculus
  misc_feature (1)...(164): n = A,T,C or G
caaccagaatgctcactnccgnggncactctcaaatgtgtngagattgcccacacgcctgngccngtgtgcttcaggttcccatgctgnnaggagccttggtcatgcagctgtctttnagntttttttgctnctaccgngtatcccgtaataaaactcattggt

SEQ ID NO: 1200 - DNA, 504 bp, Mus musculus
gaactgagatgtgaatgaatattgaagttcagagaatttaagtttggttcaacattatccttttggtagatttgggagcctacctttgagaccaagcctgtcacccttcagacctctctccaagaccaaagatccaaagatgcggaataagccccagcggccccctggtcttcactcacccctagcagcccaccagctctagccccacggacggttccagctctctgccccgcccgctccccgcgagcccgcgcgtgactttagcgcgcgcgcgcagctcggcccggaaggtcacctccttcatcacggattctatttgcatccggaatcgcatgtacatgaaaaatgtgtccgcgtgcggccccgactgcagacgcagatgaaattctgtgccgagcctgatgcgcggtaacctttgcagatggcgccgctattgctgagaaatggattgcttaataaagcgtatcatccggcatatttgctgcttggctagccaaaaaaaag

SEQ ID NO: 1201 - DNA, 104 bp, Mus musculus
  misc_feature (1)...(104): n = A,T,C or G
ttaggggagggataagaccatgagnntntgtncgtgagngcnctcaaagcaacggctttctaaacattccggttacaccaggcngacgaagccggggctcttgg

SEQ ID NO: 1202 - DNA, 160 bp, Mus musculus
  misc_feature (1)...(160): n = A,T,C or G
aattaaaaggctttctgtctttgnattcgagggcagttntnctaccttntcatgcccaagcctcatnanagctaggtaatacttgcttggggaatnggngcgnccactgaatgtaacttnctggcacccttaagaactggactgacaagcttgtggaggg

SEQ ID NO: 1203 - DNA, 409 bp, Mus musculus
  misc_feature (1)...(409): n = A,T,C or G
gaactgagcacagaggcagtagaaacaaganaagatcaaggactggaccgtgaagcaccaggaactgactaaggtgcataatttacccaccaaagcagagctggcctccaggttccccagcgcccncctcagtccctacctggcataccctgcccccaacagggaactttccagcccaggtgcttgtccgccctcccccaagagtctcctcccaatataatccagacatttagtctctgcccttctctctcttcctctccttctcttctttctcctccaatgctcccttttgctcccctacccccacccccatggcaatcccatggcctcaatccctggggtcagtgaacctgcccgcctgagagtagcatcccaataaacctgtcttcaggtactccaaaaaaaaaaa

SEQ ID NO: 1204 - DNA, 289 bp, Mus musculus
  misc_feature (1)...(289): n = A,T,C or G
aatggaacactggcctttcctganaggatnnagacccggctaanagangannaccnttgntngcagnnagagnnggntacagaggaacgagtctgaactggaaaatacnagcgttactgacaggcactgcctgtgcacaaagaagctccagtacnctccagcagtgggaaaagttggccanagancaaggttgccagccgaagccagtctttccctgtcgtgaaaggaggcaggagggtgnggacaactgagtgttttgagngatattcatatagatggtatgatatat

SEQ ID NO: 1205 - DNA, 115 bp, Mus musculus
gactgagaacttctggaccaagctgggaaatgtcaaagaaagtgaacactatggtctttgacttttagtagtttacattcaatcccagatatgacatgaaggaaaaacaaaacaa

SEQ ID NO: 1206 - DNA, 119 bp, Mus musculus
gcactatgggcatgaggacacgtcctgtgacaggtacaggcatctcctgagaaatgtcatctgatcagcaacataacattttggggaactaaagagcatttctttccacaaaaaaaaaa

What is claimed is:

1. An isolated polynucleotide comprising a contiguous stretch of at least about 60 nucleotides first disclosed in at least one of SEQ ID NOS: 1-1,206.

2. An isolated polynucleotide according to claim 1, wherein said polynucleotide sequence comprises at least one of SEQ ID NOS: 1-1,206.

3. An in vitro process for producing an isolated polynucleotide incorporating a sequence capable of hybridizing to a sequence first disclosed in one of SEQ ID NOS: 1-1,206, comprising the steps of:
a) obtaining a polynucleotide template encoding a sequence capable of hybridizing to an GTS of SEQ ID NOS: 1-1,206;
b) contacting said template with a polynucleotide probe comprising at least about 25 contiguous bases first disclosed in SEQ ID NOS: 1-1,206;
c) processing the combined probe and template to allow the specific detection of the combined probe and template; and
d) isolating a clone encoding said template.

4. The process of claim 3 wherein said template is mammalian cDNA.

5. The process of claim 3 wherein said template is mammalian genomic DNA.

6. A process according to claim 4 wherein said template is of human origin.

7. A process for identifying novel polynucleotide sequences comprising the steps of:
a) retrieving a computer readable representation of a polynucleotide sequence first disclosed in at least one of SEQ ID NOS: 1-1,206, or an amino acid sequence encoded thereby, from a computer addressable form of electronic data storage medium;
b) retrieving a computer readable representation of a test polynucleotide or polypeptide sequence from a computer addressable form of electronic data storage medium; and
c) comparing the sequence of said test polynucleotide or polypeptide sequence to a sequence first disclosed in at least one of SEQ ID NOS: 1-1,206, or an amino acid sequence encoded thereby.

8 An isolated murine embryonic stem cell line comprising an engineered retroviral gene trap vector in at least one gene comprising a polynucleotide sequence first disclosed in one of SEQ ID NOS: 1-1,206.
